(19) United States
(12) Patent Application Publication
(10) Pub. No.: US 2016/0208271 A1
(43) Pub. Date: Jul. 21, 2016

(54) METHODS FOR PRODUCING GENETIC MODIFICATIONS IN A PLANT GENOME WITHOUT INCORPORATING A SELECTABLE TRANSGENE MARKER, AND COMPOSITIONS THEREOF

(71) Applicants: E. I. DU PONT DE NEMOURS AND COMPANY, Wilmington, DE (US); PIONEER HI-BRED INTERNATIONAL, INC., Johnston, IA (US)

(72) Inventors: Andrew Mark Cigan, Johnston, IA (US); Saverio Carl Falco, Wilmington, DE (US); Michael Lassner, Urbandale, IA (US); Zhan-Bin Liu, West Chester, PA (US); Sergei Svitashev, Johnston, IA (US)

(21) Appl. No.: 14/913,607

(22) PCT Filed: Aug. 20, 2014
(86) PCT No.: PCT/US14/51781

§ 371 Date: Feb. 22, 2016

Related U.S. Application Data
(60) Provisional application No. 61/868,706, filed on Aug. 22, 2013.
(60) Provisional application No. 61/882,532, filed on Sep. 25, 2013.
(60) Provisional application No. 61/937,045, filed on Feb. 7, 2014.
(60) Provisional application No. 61/953,090, filed on Mar. 14, 2014.
(60) Provisional application No. 62/023,239, filed on Jul. 11, 2014.

(51) Int. Cl. C12N 15/82

(52) U.S. Cl. CPC C12N 15/8213; C12N 15/8278; C12N 15/8275; C12N 15/8274

(57) ABSTRACT

Compositions and methods are provided for genome modification of a target sequence in the genome of a plant or plant cell, without incorporating a selectable transgene marker. The methods and compositions employ a guide polynucleotide/Cas endonuclease system to provide an effective system for modifying or altering target sites within the genome of a plant, plant cell or seed, without incorporating a selectable transgene marker. Once a genomic target site is identified, a variety of methods can be employed to further modify the target sites such that they contain a variety of polynucleotides of interest. Breeding methods and methods for selecting plants utilizing a guide polynucleotide/Cas endonuclease system are also disclosed. Compositions and methods are also provided for editing a nucleotide sequence in the genome of a cell, without incorporating a selectable transgene marker.

[0001] This application claims the benefit of U.S. Provisional Application No. 61/868,706, filed Aug. 22, 2013, U.S. Provisional Application No. 61/882,532, filed Sep. 25, 2013, U.S. Provisional Application No. 61/937,045, filed Feb. 7, 2014, U.S. Provisional Application No. 61/953,090, filed Mar. 14, 2014, and U.S. Provisional Application No. 62/023,239, filed Jul. 11, 2014; all of which are hereby incorporated herein in their entirety by reference.

### FIELD

[0002] The disclosure relates to the field of plant molecular biology, in particular, to methods for altering the genome of a plant cell.

### REFERENCE TO SEQUENCE LISTING SUBMITTED ELECTRONICALLY

[0003] The official copy of the sequence listing is submitted electronically via EFS-Web as an ASCII formatted sequence listing with a file named 20140814_BB2365PCT_ST25_SequenceListing created on Aug. 14, 2014 and having a size of 584 kilobytes and is filed concurrently with the specification. The sequence listing contained in this ASCII formatted document is part of the specification and is herein incorporated by reference in its entirety.

### BACKGROUND

[0004] Recombinant DNA technology has made it possible to insert foreign DNA sequences into the genome of an organism, thus, altering the organism's phenotype. The most commonly used plant transformation methods are Agrobacterium infection and biolistic particle bombardment in which transgenes integrate into a plant genome in a random fashion and in an unpredictable copy number. Thus, efforts are undertaken to control transgene integration in plants.

[0005] One method for inserting or modifying a DNA sequence involves homologous DNA recombination by introducing a transgenic DNA sequence flanked by sequences homologous to the genomic target. U.S. Pat. No. 5,527,695 describes transforming eukaryotic cells with DNA sequences that are targeted to a predetermined sequence of the eukaryote's DNA. Specifically, the use of site-specific recombination is discussed. Transformed cells are identified through use of a selectable marker included as a part of the introduced DNA sequences.

[0006] It was shown that artificially induced site-specific genomic double-stranded breaks in plant cells were repaired by homologous recombination with exogenously supplied DNA using two different pathways. (Puchta et al., (1996) Proc. Natl. Acad. Sci. USA 93:5055-5060; U.S. Patent Application Publication No. 2005/0172365A1 published Aug. 4, 2005; U.S. Patent Application Publication No. 2006/0282914 published Dec. 14, 2006; WO 2005/028942 published Jun. 2, 2005).

[0007] Since the isolation, cloning, transfer and recombination of DNA segments, including coding sequences and non-coding sequences, is most conveniently carried out using restriction endonuclease enzymes. Much research has focused on studying and designing endonucleases such as WO 2004/067736 published Aug. 12, 2004; U.S. Pat. No. 5,792,632 issued to Dujon et al., Aug. 11, 1998; U.S. Pat. No. 6,610,545 B2 issued to Dujon et al., Aug. 26, 2003; Chevalier et al., (2002) Mol Cell 10:895-905; Chevalier et al., (2001) Nucleic Acids Res 29:3757-3774; Seligman et al., (2002) Nucleic Acids Res 30:3870-3879.

[0008] Although several approaches have been developed to target a specific site for modification in the genome of a plant, there still remains a need for more efficient and effective methods for producing a fertile plant, having an altered genome comprising specific modifications in a defined region of the genome of the plant.

[0009] There remains a need to develop a genetic modification system that can modify a genomic location without incorporating a selectable transgene marker.

### BRIEF SUMMARY

[0010] Compositions and methods are provided employing a guide polynucleotide/Cas endonuclease system in plants for genome modification of a target sequence in the genome of a plant or plant cell, for selecting plants, for gene editing, and for inserting a polynucleotide of interest into the genome of a plant without incorporating a selectable transgene marker.

[0011] The methods and compositions employ a guide polynucleotide/Cas endonuclease system to provide for an effective system for modifying or altering target sites and nucleotide of interest within the genome of a plant, plant cell or seed without incorporating a selectable transgene marker.

[0012] Once a genomic target site is identified, a variety of methods can be employed to further modify the target sites such that they contain a variety of polynucleotides of interest. Breeding methods and methods for selecting plants utilizing a two component RNA guide and Cas endonuclease system are also disclosed. Also provided are nucleic acid constructs, plants, plant cells, explants, seeds and grain having the guide polynucleotide/Cas endonuclease system. The methods and compositions employ a guide polynucleotide/Cas endonuclease system to provide for an effective system for modifying or altering target sites and editing nucleotide sequences of interest within the genome of a cell, wherein the guide polynucleotide is comprised of a RNA sequence, a DNA sequence, or a DNA-RNA combination sequence.

[0013] Thus in one embodiment of the disclosure, the method comprises a method for producing a genetic modification into a second gene of a plant genome without introducing an exogenous selectable marker into said plant genome, the method comprising providing a first guide polynucleotide, a polynucleotide modification template, a second guide polynucleotide, and a Cas endonuclease to a plant cell comprising a first endogenous gene that can be modified to confer herbicide resistance, wherein said first guide polynucleotide and Cas endonuclease are capable of forming a first complex that enables the Cas endonuclease to introduce a double strand break at a first target site, located in or near said first endogenous gene in the genome of said plant cell, wherein said second guide polynucleotide and Cas endonuclease are capable of forming a second complex that enables the Cas endonuclease to introduce a double strand break at a second target site in the genome of said plant cell, wherein said polynucleotide modification template comprises at least one nucleotide alteration when compared to the first endogenous gene.

[0014] In one embodiment of the disclosure, the method comprises a method for introducing a polynucleotide of interest into a plant genome without introducing an exogenous selectable marker into said plant genome, the method comprising providing a first guide RNA, a first polynucleotide modification template, a second guide RNA, a second polynucleotide modification template, and a Cas endonuclease to a plant cell comprising a first endogenous gene that can be modified to confer herbicide resistance, wherein said first guide RNA and Cas endonuclease are capable of forming a first complex that enables the Cas endonuclease to introduce a double strand break at a first target site located in or near said first endogenous gene in the genome of said plant cell, wherein said first polynucleotide modification template comprises at least one nucleotide modification of said first endogenous gene to render said endogenous gene capable of conferring herbicide resistance to a plant cell, wherein said second guide RNA and Cas endonuclease are capable of forming a second complex that enables the Cas endonuclease to introduce a double strand break at a second target site in the genome of said plant cell, wherein said second polynucleotide modification template comprises at least one polynucleotide of interest to be introduced into said plant genome.

[0015] In one embodiment of the disclosure, the method comprises a method for editing a second gene of a plant genome without introducing an exogenous selectable marker into said plant genome, the method comprising providing a first guide RNA, a first polynucleotide modification template, a second guide RNA, a second polynucleotide modification template, and a Cas endonuclease to a plant cell comprising a first endogenous gene that can be modified to confer herbicide resistance, wherein said first guide RNA and Cas endonuclease are capable of forming a complex that enables the Cas endonuclease to introduce a double strand break at a first target site (located in or near said first endogenous gene) in the genome of said plant cell, wherein said first polynucleotide modification template comprises at least one nucleotide modification of said first endogenous gene to render said endogenous gene capable of conferring herbicide resistance to a plant cell, wherein said second guide RNA and Cas endonuclease are capable of forming a complex that enables the Cas endonuclease to introduce a double strand break at a second target site (located at a different locus than said first endogenous gene) in the genome of said plant cell, wherein said second polynucleotide modification template comprises at least one nucleotide alteration when compared to the second gene to be edited.

[0016] Additional embodiments of the methods and compositions of the present invention are disclosed herein.

### BRIEF DESCRIPTION OF THE DRAWINGS AND THE SEQUENCE LISTING

[0017] The disclosure can be more fully understood from the following detailed description and the accompanying drawings and Sequence Listing, which form a part of this application. The sequence descriptions and sequence listing attached hereto comply with the rules governing nucleotide and amino acid sequence disclosures in patent applications as set forth in 37 C.F.R. §§1.821-1.825. The sequence descriptions contain the three letter codes for amino acids as defined in 37 C.F.R. §§1.821-1.825, which are incorporated herein by reference.

### FIGURES

[0018] FIG. 1A shows a maize optimized Cas9 gene (encoding a Cas9 endonuclease) containing a potato ST-LS1 intron, a SV40 amino terminal nuclear localization sequence (NLS), and a VirD2 carboxyl terminal NLS, operably linked to a plant ubiquitin promoter (SEQ ID NO: 5). The maize optimized Cas9 gene (just Cas9 coding sequence, no NLSs) corresponds to nucleotide positions 2037-2411 and 2601-6329 of SEQ ID NO: 5 with the potato intron residing at positions 2412-2600 of SEQ ID NO: 5.SV40 NLS is at positions 2010-2036 of SEQ ID NO: 5. VirD2 NLS is at positions 6330-6386 of SEQ ID NO: 5. FIG. 1 B shows a long guide RNA operably linked to a maize U6 polymerase III promoter terminating with a maize U6 terminator (SEQ ID NO: 12). The long guide RNA containing the variable targeting domain corresponding to the maize LIGCas-3 target site (SEQ ID NO: 8) is transcribed from/corresponds to positions 1001-1094 of SEQ ID NO: 12. FIG. 1 C shows the maize optimized Cas9 and long guide RNA expression cassettes combined on a single vector DNA (SEQ ID NO: 102).

[0019] FIG. 2A illustrates the duplexed crRNA (SEQ ID NO:6)-tracrRNA (SEQ ID NO:7)/Cas9 endonuclease system and target DNA complex relative to the appropriately oriented PAM sequence at the maize LIGCas-3 (SEQ ID NO: 18, Table 1) target site with triangles pointing towards the expected site of cleavage on both sense and anti-sense DNA strands. FIG. 2 B illustrates the guide RNA/Cas9 endonuclease complex interacting with the genomic target site relative to the appropriately oriented PAM sequence (GGA) at the maize genomic LIGCas-3 target site (SEQ ID NO:18, Table 1). The guide RNA (shown as boxed-in in light gray, SEQ ID NO:8) is a fusion between a crRNA and tracrRNA and comprises a variable targeting domain that is complementary to one DNA strand of the double strand DNA genomic target site. The Cas9 endonuclease is shown in dark gray. Triangles point towards the expected site of DNA cleavage on both sense and anti-sense DNA strands.

[0020] FIG. 3A-3B shows an alignment and count of the top 10 most frequent NHEJ mutations induced by the maize optimized guide RNA/Cas endonuclease system described herein compared to a LIG3-4 homing endonuclease control at the maize genomic Liguleless 1 locus. The mutations were identified by deep sequencing. The reference sequence represents the unmodified locus with each target site underlined. The PAM sequence and expected site of cleavage are also indicated. Deletions or insertions as a result of imperfect NHEJ are shown by a “−” or an italicized underlined nucleotide, respectively. The reference and mutations 1-10 of the LIGCas-1 target site correspond to SEQ ID NOs: 55-65, respectively. The reference and mutations 1-10 of the LIGCas-2 correspond to SEQ ID NOs: 55, 65-75, respectively. The reference and mutations 1-10 of the LIGCas-3 correspond to SEQ ID NOs: 76-86, respectively. The reference and mutations 1-10 of the LIG3-4 homing endonuclease target site correspond to SEQ ID NOs: 76, 87-96, respectively.

[0021] FIG. 4 illustrates how the homologous recombination (HR) repair DNA vector (SEQ ID NO: 97) was constructed. To promote site-specific transgene insertion by homologous recombination, the transgene (shown in light gray) was flanked on either side by approximately 1 kb of DNA with homology to the maize genomic regions immediately adjacent to the LIGCas3 and LIG3-4 homing endonuclease expected sites of cleavage.

[0022] FIG. 5 illustrates how genomic DNA extracted from stable transformants was screened for site-specific transgene insertion by PCR. Genomic primers (corresponding to SEQ ID NOs: 98 and 101) within the Liguleless 1 locus were designed outside of the regions used in constructing the HR repair DNA vector (SEQ ID NO: 97) and were paired with primers inside the transgene (corresponding to SEQ ID NOs: 99 and 100) to facilitate PCR detection of unique genomic DNA junctions created by appropriately oriented site-specific transgene integration.

[0023] FIG. 6 shows an alignment of the NHEJ mutations induced by the maize optimized guide RNA/Cas endonuclease system, described herein, when the short guide RNA was delivered directly as RNA. The mutations were identified by deep sequencing. The reference illustrates the unmodified locus with the genomic target site underlined. The PAM sequence and expected site of cleavage are also indicated. Deletions or insertions as a result of imperfect NHEJ are shown by a “−” or an italicized underlined nucleotide, respectively. The reference and mutations 1-6 for 55CasRNA-1 correspond to SEQ ID NOs: 104-110, respectively.

[0024] FIG. 7 shows the QC782 vector comprising the Cas9 expression cassette.

[0025] FIG. 8A shows the QC783 vector comprising the guide RNA expression cassette. FIG. 8B show the DNA sequence (coding sequence) of the DD43CR1 (20 bp) variable targeting domain of the guide RNA, as well as the terminator sequence linked to the guide RNA. The 20 bp variable targeting domain DD43CR1 is in bold

[0026] FIG. 9 shows the map of a linked soybean optimized Cas9 and guide RNA construct QC815.

[0027] FIG. 10 A shows the DD20 soybean locus on chromosome 4 and the DD20CR1 and DD20CR2 genomic target sites (indicated by bold arrows). FIG. 10 B shows the DD43 soybean locus on chromosome 4 and the DD43CR1 and DD43CR2 genomic target sites (indicated by bold arrows).

[0028] FIG. 11A-11D. Alignments of expected target site sequences with mutant target sequences detected in four guide RNAs induced NHEJ experiments. FIG. 11A shows the DD20CR1 PCR amplicon (reference sequence, SEQ ID NO:142, genomic target site is underlined) and the 10 mutations (SEQ ID NOs: 147-156) induced by the guideRNA/Cas endonuclease system at the DD20CR1 genomic target site. FIG. 11 B shows the DD20CR2 PCR amplicon (reference sequence, SEQ ID NO:143) and the 10 mutations (SEQ ID NOs 157-166) induced by the guide RNA/Cas endonuclease system at the DD20CR2 genomic target site. FIG. 11 C shows the DD43CR1 PCR amplicon (reference sequence, SEQ ID NO:144) and the 10 mutations (SEQ ID NOs:167-176) induced by the guide RNA/Cas endonuclease system at the DD43CR1 genomic target site. FIG. 11D shows the DD43CR2 PCR amplicon (reference sequence, SEQ ID NO:145) and the 10 mutations (SEQ ID NOs: 177-191) induced by the guide RNA/Cas endonuclease system at the DD43CR2 genomic target site. The target sequences corresponding different guide RNAs are underlined. Each nucleotide deletions is indicated by “−”. Inserted and replaced sequences are in bold. The total number of each mutant sequence is listed in the last column.

[0029] FIG. 12A-12B shows a schematic representation of the guide RNA/Cas endonuclease system used for editing a nucleotide sequence of interest. To enable specific nucleotide editing, a polynucleotide modification template that includes at least one nucleotide modification (when compared to the nucleotide sequence to be edited) is introduced into a cell together with the guide RNA and Cas endonuclease expression cassettes. For example, as shown herein, the nucleotide sequence to be edited is an endogenous wild type enolpyruvylshikimate-3-phosphate synthase (EPSPS) gene in maize cells. The Cas endonuclease (shaded circle) is a maize optimized Cas9 endonuclease that cleaves a moCas9 target sequence within the epsps genomic locus using a guide RNA of SEQ ID NO:194. FIG. 12-A shows a polynucleotide modification template that includes three nucleotide modifications (when compared to the wild type epsps locus depicted in FIG. 12-B) flanked by two homology regions HR-1 and HR-2. FIG. 12-B shows the guide RNA/maize optimized Cas9 endonuclease complex interacting with the epsps locus. The original nucleotide codons of the EPSPS gene that needed to be edited are show as aCT and Cca (FIG. 12-B). The nucleotide codons with modified nucleotides (shown in capitals) are shown as aTC and Tca (FIG. 12-B).

[0030] FIG. 13 shows a diagram of a maize optimized Cas9 endonuclease expression cassette. The bacterial cas9 coding sequence was codon optimized for expression in maize cells and supplemented with the ST-LS1 potato intron (moCas9 coding sequence, SEQ ID NO: 193). A DNA fragment encoding the SV40 nuclear localization signal (NLS) was fused to the 5′-end of the moCas9 coding sequence. A maize ubiquitin promoter (Ubi promoter) and its cognate intron (ubi intron) provided controlling elements for the expression of moCas9 in maize cells. The pinII transcription termination sequence (pinII) completed the maize moCAS9 gene design.

[0031] FIG. 14 shows some examples of the moCas9 target sequence (underlined), located on EPSPS DNA fragments, mutagenized by the introduction of double-strand breaks at the cleavage site of the moCas9 endonuclease (thick arrow) in maize cells. In SEQ ID NO: 206, three nucleotides were deleted (dashes) next to the moCas9 cleavage site. SEQ ID NOs: 207-208 indicate that the nucleotide deletion can expand beyond the moCAs9 cleavage site

[0032] FIG. 15 depicts an EPSPS template vector used for delivery of the EPSPS polynucleotide modification template containing the three TIPS nucleotide modifications. The EPSP polynucleotide modification template includes a partial fragment of the EPSPS gene. The vector was 6,475 bp in length and consisted of two homology regions to the epsps locus (epsps-HR1 and epsps-HR2). Two Gateway cloning sites (ATTL4 and ATTL3), an antibiotic resistance gene (KAN), and the pUC origin of replication (PUC ORI) completed synthesis of the EPSPS template vector1.

[0033] FIG. 16 illustrates the PCR-based screening strategy for the identification of maize events with TIPS nucleotide modifications in maize cells. Two pairs of PCR primers were used to amplify the genomic fragments of the epsps locus (upper section). Both of them contained the TIPS specific primers (an arrow with a dot indicating the site of the three TIPS modifications). The shorter fragment (780 bp F-E2) was produced by amplification of the EPSPS polynucleotide modification template fragment (template detection). The amplified EPSPS polynucleotide modification template fragment was found in all but 4 analyzed events (panel F-E2). The longer fragment (839 bp H-T) was produced by amplification of the genomic EPSPS sequence providing that the epsps locus contained the three nucleotide modifications responsible for the TIPS modifications. Six events were identified as containing the three nucleotide modifications (panel H-T). The white arrows point to events that contain both the amplified EPSPS polynucleotide modification template and the nucleotide modifications responsible for the TIPS modification.

[0034] FIG. 17 A shows a schematic diagram of the PCR protocol used to identify edited EPSPS DNA fragments in selected events. A partial genomic fragment, comprising parts of Exon1, Intron 1 and Exon2 of the epsps locus, was amplified regardless of the editing product (panel A, 1050 bp F-E3). The amplification products, representing only partial EPSPS gene sequences having one or more mutations, were cloned and sequenced. FIG. 17-B shows 2 examples of sequenced amplification products. In some amplification products, the epsps nucleotides and the moCas9 target sequence (underlined) were unchanged indicating that one EPSPS allele was not edited (wild type allele; SEQ ID NO: 210). In other amplification products, three specific nucleotide substitutions (representing the TIPS modifications) were identified with no mutations at the moCas9 target sequence (underlined) (SEQ ID NO: 209).

[0035] FIG. 18 shows the location of MHP14, TS8, TS9 and TS10 loci comprising target sites for the guide RNA/Cas endonuclease system near trait A (located at 53.14 cM) on chromosome 1 of maize.

[0036] FIG. 19A shows the location of the MHP14Cas1 maize genomic target sequence (SEQ ID NO: 229) and the MSP14Cas-3 maize genomic target sequence (SEQ ID NO: 230) on the MHP14 maize genomic DNA locus on chromosome1. The 5′ to 3′ sequence. FIG. 19B shows the location of the TS8Cas-1 (SEQ ID NO: 231) and TS8Cas-2 (SEQ ID NO: 232) maize genomic target sequences located on the TS8 locus. FIG. 19-C shows the location of the TS9Cas-2 (SEQ ID NO: 233) and TS9Cas-3 (SEQ ID NO: 234) maize genomic target sequences located on the TS8 locus. FIG. 19-D shows the location of the TS10Cas-1 (SEQ ID NO: 235), and TS10Cas-3 (SEQ ID NO: 236) maize genomic target sequences located on the TS10 locus. All these maize genomic target sites are recognized are recognized and cleaved by a guide RNA/Cas endonuclease system described herein. Each maize genomic target sequence (indicated by an arrow) is highlighted in bold and followed by the NGG PAM sequence shown boxed in.

[0037] FIG. 20 shows a schematic of a donor DNA (also referred to as HR repair DNA) comprising a transgene cassette with a selectable marker (phosphomannose isomerase, depicted in grey), flanked by homologous recombination sequences (HR1 and HR2) of about 0.5 to 1 kb in length, used to introduce the transgene cassette into a genomic target site for the guide RNA/Cas endonuclease system. The arrows indicate the sections of the genomic DNA sequence on either side of the endonuclease cleavage site that corresponds to the homologous regions of the donor DNA. This schematic is representative for homologous recombination occurring at any one of the 8 target sites (4 loci) located on chromosome 1 from 51.54cM to 54.56cM in maize genome.

[0038] FIG. 21 shows the junction PCR screen for identification of insertion events. Primer 1 and 2 located on the transgene donor are common for all target sites. Primer TSHR1f is located on the genomic region outside of the homologous sequence HR1. Primer combination THR1f/primer1 amplify junction 1. Primer TSHR2r is located on the genomic region outside of the HR2 region. Primer combination primer2/TSHR2r amplify junction 2.

[0039] FIG. 22 shows a junction PCR screen for identification of insertion events at the TS10Cas10 locus. A gel picture indicates the presence of insertion events at the TS10Cas10-1 target site (lane 02 A1). PCR reaction of HR1 and HR2 junction loaded next to each other (lane 02-white label and lane 02-gray label), with white label representing HR1 junction PCR, gray label representing HR2 junction PCR.

[0040] FIG. 23 A-B. DNA expression cassettes used in gRNA/Cas9 mediated genome modification experiments. A) The Cas9 endonuclease cassette (EF1A2:CAS9) comprising a soybean EF1A2 promoter (GM-EF1A2 PRO) driving the soybean codon optimized Cas9 endonucleases (CAS9(SO), a soybean optimized SV40 nuclear localization signal (SV40 NLS(SO)) and a PINII terminator (PINII TERM) was linked to a guide RNA expression cassette (U6-9.1:DD20CR1, comprising a soybean U6 promoter driving the DD20CR1 guide RNA) used in experiment U6-9.1DD20CR1 (Table 27). Other Guide RNA/Cas9 cassettes listed in Table 27 are identical except for the 20 bp variable targeting domains of the guide RNA targeting the genomic target sites DD20CR2, DD43CR1, or DD43CR2. B) The donor DNA cassette (DD20HR1-SAMS:HPT-DD20HR2) used in experiment U6-9.1DD20CR1 (Table 27). DD20HR1 and DD20HR2 homologous DNA regions between the donor DNA cassette and the genomic DNA sequences flanking the DD20 target site). Other Donor DNA cassettes listed in Table 27 are identical except for the DD43HR1 and DD43HR2 regions in two of them.

[0041] FIG. 24 A-C. DD20 and DD43 soybean genomic target sites locations and qPCR amplicons. A) Diagram of Glycine max chromosome 04 indicating relative positions of DD20 and DD43 target sites. Genetic mapping positions of DD20 and DD43 sites are the positions of the most nearby genes Glyma04g39780.1 and Glyma04g39550.1. B) DD20 qPCR 64 bp amplicon 45936307-45936370 from chromosome 04 (SEQ ID NO: 304). Relative positions of the target sites DD20-CR1 and DD20-CR2, qPCR primers and probe DD20-F, DD20-R, and DD20-T are marked. C) DD43 qPCR 115 bp amplicon 45731879-45731993 from chromosome 04 (SEQ ID NO: 305). Relative positions of the target sites DD43-CR1 and DD43-CR2, qPCR primers and probe DD43-F2, DD43-F, DD43-R, and DD43-T are marked.

[0042] FIG. 25 A-C. Schematic of guide RNA/Cas9 system mediated site-specific non-homologous end joining (NHEJ) and transgene insertion via homologous recombination (HR) at DD20CR1 site. A) Soybean plants are co-transformed with guide RNA/Cas9 and donor DNA cassettes as listed in Table 27. The DD20CR1 guide RNA/Cas9 complex transcribed from the linked guide RNA/Cas9 DNA cassettes will cleave specifically the DD20CR1 target site on chromosome 04 to make DNA double strand breaks. The breaks can be repaired spontaneously as NHEJs or repaired as a HR event by the donor DNA facilitated by the flanking homologous regions DD20-HR1 and DD20HR2. B) NHEJs are detected by DD20-specific qPCR and the mutated sequences are assessed by sequencing cloned HR1-HR2 PCR fragments. C) HR events are revealed by two border-specific PCR analyses HR1-SAMS and NOS-HR2, noting that the primers are only able to amplify DNA recombined between the DD20CR1 region of chromosome 04 and the donor DNA. Guide RNA/Cas9 mediated NHEJ and HR at DD20-CR2 site follow the same process except for using DD20-CR2 guide RNA. Guide RNA/Cas9 mediated site-specific NHEJ and HR at DD43CR1 and DD43CR2 sites follow the same process except for using guide RNA and homologous regions specific to the DD43 sites.

[0043] FIG. 26 A-C. Sequences of gRNA/Cas9 system mediated NHEJs. Only 60 bp sequences surrounding the genomic target site shown in bold case are aligned to show the mutations. The PAM sequence is shown boxed in. Insertion sequences are indicated by symbol ̂ marking the insertion position followed by the size of the insert. Actual insertion sequences are listed in the sequences listing. A) U6-9.1 DD20CR1 sequences. Three colonies were sequenced for each of 54 events from experiment U6-9.1 DD20CR1. A total of 150 sequences were returned, of which 26 were found to be short unique deletions while 2 of the events contained small insertions. B) U6-9.1DD20CR2 sequences. Three colonies were sequenced for each of 28 events from experiment U6-9.1DD20CR2. A total of 84 sequences were returned, of which 20 were found to be short unique deletions while 1 of the events contained a single by insertion. C) U6-9.1DD43CR1 sequences. Three colonies were sequenced for each of 46 events from experiment U6-9.1DD43CR1. A total of 132 sequences were returned, of which 18 were found to be short unique deletions while 10 of the events contained small insertions. D) U6-9.1DD43CR2 sequences.

[0044] FIG. 27 A-C shows the ten most prevalent types of NHEJ mutations recovered based on the crRNA/tracrRNA/Cas endonuclease system. FIG. 27A shows NHEJ mutations for LIGCas-1 target site, corresponding to SEQ ID NOs: 415-424), FIG. 27B shows NHEJ mutations for LIGCas-2 target site corresponding to SEQ ID NOs: 425-434) and FIG. 27V shows NHEJ mutations (for LIGCas-3 target site corresponding to SEQ ID NOs: 435-444).

[0045] FIG. 28. Schematic representation of Zm-GOS2 PRO:GOS2 INTRON insertion in the 5′-UTR of maize ARGOS8 gene by targeting the guide RNA/Cas9 target sequence 1 (CTS1, SEQ ID NO: 1) with the gRNA1/Cas9 endonuclease system, described herein. HR1 and HR2 indicate homologous recombination regions.

[0046] FIG. 29A-29C. Identification and analysis of Zm-GOS2 PRO:GOS2 INTRON insertion events in maize plants. (A) Schematic representation of Zm-GOS2 PRO:GOS2 INTRON insertion in the 5′-UTR of Zm-ARGOS8. CTS1 was targeted with the gRNA1/Cas9 endonuclease system, described herein. HR1 and HR2 indicate homologous recombination regions. P1 to P4 indicate PCR primers. (B) PCR screening of PMI-resistance calli to identify insertion events. PCR results are shown for 13 representative calli. The left and right junction PCRs were carried out with the primer pair P1+P2 and P3+P4, respectively. (C) PCR analysis of a T0 plant. A PCR product with the expected size (2.4 kb, Lane T0) was amplified with the primer P3 and P4.

[0047] FIG. 30. Schematic representation of Zm-ARGOS8 promoter substitution with Zm-GOS2 PRO:GOS2 INTRON by targeting CTS3 (SEQ ID NO: 3) and CTS2 (SEQ ID NO:2). HR1 and HR2 indicate homologous recombination regions.

[0048] FIG. 31A-31 D. Substitution of the native promoter of the ARGOS8 gene with Zm-GOS2 PRO:GOS2 INTRON in maize plants. (A) Schematic representation of the Zm-GOS2 PRO:GOS2 INTRON:ARGOS8 allele generated by promoter swap. Two guide RNA/Cas9 target sites, CTS3 (SEQ ID NO:3) and CTS2 (SEQ ID NO:2), were targeted with a gRNA3/gRNA2/Cas9 system. HR1 and HR2 indicate homologous recombination regions. P1 to P5 indicate PCR primers. (B) PCR screening of PMI-resistance calli to identify swap events. PCR results are shown for 10 representative calli. One callus sample, 12A09, is positive for both left junction (L, primer P1+P2) and right junction (R, primer P5+P4) PCR, indicating that 12A09 is a swap event. (C) PCR analysis of the callus events identified in primary screening. PCR products with the expected size (2.4 kb) were amplified using the primer P3 and P4 from event #3, 4, 6, 8 and 9, indicating presence of the Zm-GOS2 PRO:GOS2 INTRON:ARGOS8 allele. (D) PCR analysis of a T0 plant. A PCR product with the expected size (2.4 kb, Lane T0) was amplified with the primer P3 and P4.

[0049] FIG. 32A-32B. Deletion of the native promoter of the ARGOS8 gene in maize plants. (A) Schematic representation of promoter deletion. Two guide RNA's and a Cas9 endonuclease system, referred to as a gRNA3/gRNA2/Cas9 system, were used to target the CTS3 and CTS2 sites in Zm-ARGOS8. P1 and P4 indicate PCR primers for deletion event screening. (B) PCR screening of PMI-resistance calli to identify deletion events. PCR results are shown for 15 representative calli. A 1.1-kp PCR product indicates deletion of the CTS3/CTS2 fragment.

[0050] FIG. 33. Schematic representation of enhancer element deletions using the guide RNA/Cas9 target sequence. The enhancer element to be deleted can be, but is not limited to, a 35S enhancer element.

[0051] FIG. 34A-34C. Modification of a maize EPSPS polyubiquitination site. (A) The selected maize EPSPS polyubiquitination site is compared to the analogous sites of other plant species. (B) The nucleotides to be edited in the maize EPSPS coding sequence (underlined, encoded amino acid shown in bold). (C) The edited EPSPS coding sequence identified in the selected T0 plant.

[0052] FIG. 35A-35C. The intron mediated enhanced element (A). The 5′ section of the first intron of the EPSPS gene (editing: substitutions underlined and deletions represented by dots) (B) and its edited version conferring three IMEs elements (underlined). The edited nucleotides are shown in bold (C).

[0053] FIG. 36A-36B. Alternatively spliced EPSPS mRNA in maize cells. (A) left panel represents analysis of EPSPS cDNA. The lane 14 in FIG. 36A shows amplification of the EPSPS pre-mRNA containing the 3^{rd} intron unspliced (the 804 bp diagnostic fragment as shown in FIG. 36 B indicates an alternate splicing event). Lanes E3 and F8 show the EPSPS PCR amplified fragments with spliced introns. These diagnostic fragments are not amplified unless cDNA is synthesized (as is evident by the absence of bands in lanes E3, 14, and F8 comprising total RNA (shown in the total RNA panel on right of FIG. 36A). The grey boxes in FIG. 36 B represent the eight EPSPS exons (their sizes are indicated above each of them).

[0054] FIG. 37. Splicing site at the junction between the second EPSPS intron and the third exon (bolded). The nucleotide to be edited is underlined.

[0055] FIG. 38. Schematic representation of Southern hybridization analysis of T0 and T1 plants.

[0056] FIG. 39. Schematic representation of methods for producing a genetic modification (a gene insertion, a gene knockout via non-homologous-end-joining (NHEJ), a gene editing, or any combination thereof) into a second gene of a plant genome without introducing an exogenous selectable marker into said plant genome. A first endogenous gene (located in a first locus-locus 1) can be modified to confer herbicide resistance using a first guide polynucleotide/Cas endonuclease system together with a first polynucleotide modification template. At the same time, a second guide polynucleotide/Cas endonuclease system is provided to the same cell, with or without a second polynucleotide modification template to enable the second guide polynucleotide/Cas endonuclease system to introduce a double strand break at a second target site in the genome of said plant cell, resulting in either a gene insertion, gene knockout (NHEJ) or a gene editing. The second gene can be located at different locus (say locus 2) than the first endogenous gene. A “*” represents at least one nucleotide alteration in the polynucleotide modification template (PMT). A second PMT can comprise a polynucleotide of interest (shown by a white box) for gene insertion.

### SEQUENCES

[0057] SEQ ID NO: 1 is the nucleotide sequence of the Cas9 gene from Streptococcus pyogenes M1 GAS (SF370).

[0058] SEQ ID NO: 2 is the nucleotide sequence of the potato ST-LS1 intron.

[0059] SEQ ID NO: 3 is the amino acid sequence of SV40 amino N-terminal.

[0060] SEQ ID NO: 4 is the amino acid sequence of Agrobacterium tumefaciens bipartite VirD2 T-DNA border endonuclease carboxyl terminal.

[0061] SEQ ID NO: 5 is the nucleotide sequence of an expression cassette expressing the maize optimized Cas9.

[0062] SEQ ID NO: 6 is the nucleotide sequence of crRNA containing the LIGCas-3 target sequence in the variable targeting domain.

[0063] SEQ ID NO: 7 is the nucleotide sequence of the tracrRNA.

[0064] SEQ ID NO: 8 is the nucleotide sequence of a long guide RNA containing the LIGCas-3 target sequence in the variable targeting domain.

[0065] SEQ ID NO: 9 is the nucleotide sequence of the Chromosome 8 maize U6 polymerase III promoter.

[0066] SEQ ID NO: 10 list two copies of the nucleotide sequence of the maize U6 polymerase III terminator.

[0067] SEQ ID NO: 11 is the nucleotide sequence of the maize optimized short guide RNA containing the LIGCas-3 variable targeting domain.

[0068] SEQ ID NO: 12 is the nucleotide sequence of the maize optimized long guide RNA expression cassette containing the LIGCas-3 variable targeting domain.

[0069] SEQ ID NO: 13 is the nucleotide sequence of the Maize genomic target site MS26Cas-1 plus PAM sequence.

[0070] SEQ ID NO: 14 is the nucleotide sequence of the Maize genomic target site MS26Cas-2 plus PAM sequence.

[0071] SEQ ID NO: 15 is the nucleotide sequence of the Maize genomic target site MS26Cas-3 plus PAM sequence.

[0072] SEQ ID NO: 16 is the nucleotide sequence of the Maize genomic target site LIGCas-2 plus PAM sequence.

[0073] SEQ ID NO: 17 is the nucleotide sequence of the Maize genomic target site LIGCas-3 plus PAM sequence.

[0074] SEQ ID NO: 18 is the nucleotide sequence of the Maize genomic target site LIGCas-4 plus PAM sequence.

[0075] SEQ ID NO: 19 is the nucleotide sequence of the Maize genomic target site MS45Cas-1 plus PAM sequence.

[0076] SEQ ID NO: 20 is the nucleotide sequence of the Maize genomic target site MS45Cas-2 plus PAM sequence.

[0077] SEQ ID NO: 21 is the nucleotide sequence of the Maize genomic target site MS45Cas-3 plus PAM sequence.

[0078] SEQ ID NO: 22 is the nucleotide sequence of the Maize genomic target site ALSCas-1 plus PAM sequence.

[0079] SEQ ID NO: 23 is the nucleotide sequence of the Maize genomic target site ALSCas-2 plus PAM sequence.

[0080] SEQ ID NO: 24 is the nucleotide sequence of the Maize genomic target site ALSCas-3 plus PAM sequence.

[0081] SEQ ID NO: 25 is the nucleotide sequence of the Maize genomic target site EPSPSCas-1 plus PAM sequence.

[0082] SEQ ID NO: 26 is the nucleotide sequence of the Maize genomic target site EPSPSCas-2 plus PAM sequence.

[0083] SEQ ID NO: 27 is the nucleotide sequence of the Maize genomic target site EPSPSCas-3 plus PAM sequence.

[0084] SEQ ID NOs: 28-52 are the nucleotide sequence of target site specific forward primers for primary PCR as shown in Table 2.

[0085] SEQ ID NO: 53 is the nucleotide sequence of the forward primer for secondary PCR.

[0086] SEQ ID NO: 54 is the nucleotide sequence of Reverse primer for secondary PCR

[0087] SEQ ID NO: 55 is the nucleotide sequence of the unmodified reference sequence for LIGCas-1 and LIGCas-2 locus.

[0088] SEQ ID NOs: 56-65 are the nucleotide sequences of mutations 1-10 for LIGCas-1.

[0089] SEQ ID NOs: 66-75 are the nucleotide sequences of mutations 1-10 for LIGCas-2.

[0090] SEQ ID NO: 76 is the nucleotide sequence of the unmodified reference sequence for the LIGCas-3 and LIG3-4 homing endonuclease locus.

[0091] SEQ ID NOs: 77-86 are the nucleotide sequences of mutations 1-10 for LIGCas-3.

[0092] SEQ ID NOs: 88-96 are the nucleotide sequences of mutations 1-10 for LIG3-4 homing endonuclease locus.

[0093] SEQ ID NO: 97 is the nucleotide sequence of a donor vector referred to as an HR Repair DNA.

[0094] SEQ ID NO: 98 is the nucleotide sequence of forward PCR primer for site-specific transgene insertion at junction 1.

[0095] SEQ ID NO: 99 is the nucleotide sequence of reverse PCR primer for site-specific transgene insertion at junction 1.

[0096] SEQ ID NO: 100 is the nucleotide sequence of forward PCR primer for site-specific transgene insertion at junction 2.

[0097] SEQ ID NO: 101 is the nucleotide sequence of reverse PCR primer for site-specific transgene insertion at junction 2.

[0098] SEQ ID NO: 102 is the nucleotide sequence of the linked Cas9 endonuclease and LIGCas-3 long guide RNA expression cassettes

[0099] SEQ ID NO: 103 is the nucleotide sequence of Maize genomic target site 55CasRNA-1 plus PAM sequence.

[0100] SEQ ID NO: 104 is the nucleotide sequence of the unmodified reference sequence for 55CasRNA-1 locus.

[0101] SEQ ID NOs: 105-110 are the nucleotide sequences of mutations 1-6 for 55CasRNA-1.

[0102] SEQ ID NO: 111 is the nucleotide sequence of LIG3-4 homing endonuclease target site

[0103] SEQ ID NO: 112 is the nucleotide sequence of LIG3-4 homing endonuclease coding sequence.

[0104] SEQ ID NO: 113 is the nucleotide sequence of the MS26++ homing endonuclease target site.

[0105] SEQ ID NO: 114 is the nucleotide sequence of MS26++ homing endonuclease coding sequence

[0106] SEQ ID NO: 115 is the nucleotide sequence of the soybean codon optimized Cas9 gene.

[0107] SEQ ID NO: 116 is the nucleotide sequence of the soybean constitutive promoter GM-EF1A2.

[0108] SEQ ID NO: 117 is the nucleotide sequence of linker SV40 NLS.

[0109] SEQ ID NO: 118 is the amino acid sequence of soybean optimized Cas9 with a SV40 NLS.

[0110] SEQ ID NO: 119 is the nucleotide sequence of vector QC782.

[0111] SEQ ID NO: 120 is the nucleotide sequence of soybean U6 polymerase III promoter described herein, GM-U6-13.1 PRO.

[0112] SEQ ID NO: 121 is the nucleotide sequence of the guide RNA in FIG. 8B.

[0113] SEQ ID NO: 122 is the nucleotide sequence of vector QC783.

[0114] SEQ ID NO: 123 is the nucleotide sequence of vector QC815.

[0115] SEQ ID NO: 124 is the nucleotide sequence of a Cas9 endonuclease (cas9-2) from S. pyogenes.

[0116] SEQ ID NO: 125 is the nucleotide sequence of the DD20CR1 soybean target site

[0117] SEQ ID NO: 126 is the nucleotide sequence of the DD20CR2 soybean target site

[0118] SEQ ID NO: 127 is the nucleotide sequence of the DD43CR1 soybean target site

[0119] SEQ ID NO: 128 is the nucleotide sequence of the DD43CR2 soybean target site

[0120] SEQ ID NO: 129 is the nucleotide sequence of the DD20 sequence in FIG. 10A.

[0121] SEQ ID NO: 130 is the nucleotide sequence of the DD20 sequence complementary in FIG. 10A.

[0122] SEQ ID NO: 131 is the nucleotide sequence of DD43 sequence.

[0123] SEQ ID NO: 132 is the nucleotide sequence of the DD43 complementary sequence.

[0124] SEQ ID NO: 133-141 are primer sequences.

[0125] SEQ ID NO: 142 is the nucleotide sequence of the DD20CR1 PCR amplicon.

[0126] SEQ ID NO: 143 is the nucleotide sequence of the DD20CR2 PCR amplicon.

[0127] SEQ ID NO: 144 is the nucleotide sequence of the DD43CR1 PCR amplicon.

[0128] SEQ ID NO: 145 is the nucleotide sequence of the DD43CR2 PCR amplicon.

[0129] SEQ ID NO: 146 is the nucleotide sequence of the DD43CR2 PCR amplicon.

[0130] SEQ ID NO: 147-156 are the nucleotide sequence of mutations 1 to 10 for the DD20CR1 target site

[0131] SEQ ID NO: 157-166 are the nucleotide sequence of mutations 1 to 10 for the DD20CR2 target site

[0132] SEQ ID NO: 167-176 are the nucleotide sequence of mutations 1 to 10 for the DD43CR1 target site

[0133] SEQ ID NO: 177-191 are the nucleotide sequence of mutations 1 to 10 for the DD43CR2 target site.

[0134] SEQ ID NO: 192 is the amino acid sequence of a maize optimized version of the Cas9 protein.

[0135] SEQ ID NO: 193 is the nucleotide sequence of the maize optimized version of the Cas9 gene of SEQ ID NO: 192.

[0136] SEQ ID NO: 194 is the DNA version of guide RNA (EPSPS sgRNA).

[0137] SEQ ID NO: 195 is the EPSPS polynucleotide modification template.

[0138] SEQ ID NO: 196 is a nucleotide fragment comprising the TIPS nucleotide modifications.

[0139] SEQ ID NO: 197-204 are primer sequences shown in Table 15.

[0140] SEQ ID NO: 205-208 are nucleotide fragments shown in FIG. 14.

[0141] SEQ ID NO: 209 is an example of a TIPS edited EPSPS nucleotide sequence fragment shown in FIG. 17.

[0142] SEQ ID NO: 210 is an example of a Wild-type EPSPS nucleotide sequence fragment shown in FIG. 17.

[0143] SEQ ID NO: 211 is the nucleotide sequence of a maize enolpyruvylshikimate-3-phosphate synthase (epsps) locus

[0144] SEQ ID NO: 212 is the nucleotide sequence of a Cas9 endonuclease (genbank CS571758.1) from S. thermophiles.

[0145] SEQ ID NO: 213 is the nucleotide sequence of a Cas9 endonuclease (genbank CS571770.1) from S. thermophiles.

[0146] SEQ ID NO: 214 is the nucleotide sequence of a Cas9 endonuclease (genbank CS571785.1) from S. agalactiae.

[0147] SEQ ID NO: 215 is the nucleotide sequence of a Cas9 endonuclease, (genbank CS571790.1) from S. agalactiae.

[0148] SEQ ID NO: 216 is the nucleotide sequence of a Cas9 endonuclease (genbank CS571790.1) from S. mutant.

[0149] SEQ ID NOs: 217-228 are primer and probe nucleotide sequences described in Example 17.

[0150] SEQ ID NOs: 229 is the nucleotide sequence of the MHP14Cas1 target site.

[0151] SEQ ID NOs: 230 is the nucleotide sequence of the MHP14Cas3 target site.

[0152] SEQ ID NOs: 231 is the nucleotide sequence of the TS8Cas1 target site.

[0153] SEQ ID NOs: 232 is the nucleotide sequence of the TS8Cas2 target site.

[0154] SEQ ID NOs: 233 is the nucleotide sequence of the TS9Cas2 target site.

[0155] SEQ ID NOs: 234 is the nucleotide sequence of the TS9Cas3 target site.

[0156] SEQ ID NOs: 235 is the nucleotide sequence of the TS10Cas1 target site.

[0157] SEQ ID NOs: 236 is the nucleotide sequence of the TS10Cas3 target site.

[0158] SEQ ID NOs: 237-244 are the nucleotide sequences shown in FIG. 19A-D.

[0159] SEQ ID NOs: 245-252 are the nucleotide sequences of the guide RNA expression cassettes described in Example 18.

[0160] SEQ ID NOs: 253-260 are the nucleotide sequences of donor DNA expression cassettes described in Example 18.

[0161] SEQ ID NOs: 261-270 are the nucleotide sequences of the primers described in Example 18.

[0162] SEQ ID NOs: 271-294 are the nucleotide sequences of the primers and probes described in Example 18.

[0163] SEQ ID NO: 295 is the nucleotide sequence of GM-U6-13.1 PRO, a soybean U6 polymerase III promoter described herein,

[0164] SEQ ID NOs: 298, 300, 301 and 303 are the nucleotide sequences of the linked guideRNA/Cas9 expression cassettes.

[0165] SEQ ID NOs: 299 and 302 are the nucleotide sequences of the donor DNA expression cassettes.

[0166] SEQ ID NOs: 271-294 are the nucleotide sequences of the primers and probes described in Example 18.

[0167] SEQ ID NO: 304 is the nucleotide sequence of the DD20 qPCR amplicon.

[0168] SEQ ID NO: 305 is the nucleotide sequence of the DD43 qPCR amplicon.

[0169] SEQ ID NOs: 306-328 are the nucleotide sequences of the primers and probes described herein.

[0170] SEQ ID NOs: 329-334 are the nucleotide sequences of PCR amplicons described herein.

[0171] SEQ ID NO: 335 is the nucleotide sequence of a soybean genomic region comprising the DD20CR1 target site.

[0172] SEQ ID NO: 364 is the nucleotide sequence of a soybean genomic region comprising the DD20CR2 target site.

[0173] SEQ ID NO: 386 is the nucleotide sequence of a soybean genomic region comprising the DD43CR1 target site.

[0174] SEQ ID NOs: 336-363, 365-385 and 387-414 are the nucleotide sequences of shown in FIG. 26 A-C.

[0175] SEQ ID NOs: 415-444 are the nucleotide sequences of NHEJ mutations recovered based on the crRNA/tracrRNA/Cas endonuclease system shown in FIG. 27A-C.

[0176] SEQ ID NO: 445-447 are the nucleotide sequence of the LIGCas-1, LIGCas2 and LIGCas3 crRNA expression cassettes, respectively.

[0177] SEQ ID NO: 448 is the nucleotide sequence of the tracrRNA expression cassette.

[0178] SEQ ID NO: 449 is the nucleotide sequence of LIGCas-2 forward primer for primary PCR

[0179] SEQ ID NO: 450 is the nucleotide sequence of LIGCas-3 forward primer for primary PCR.

[0180] SEQ ID NO: 451 is the nucleotide sequence of the maize genomic Cas9 endonuclease target site Zm-ARGOS8-CTS1.

[0181] SEQ ID NO: 452 is the nucleotide sequence of the maize genomic Cas9 endonuclease target site Zm-ARGOS8-CTS2.

[0182] SEQ ID NO: 453 is the nucleotide sequence of the maize genomic Cas9 endonuclease target site Zm-ARGOS8-CTS3

[0183] SEQ ID NOs: 454-458 are the nucleotide sequence of primers P1, P2, P3, P4, P5, respectively.

[0184] SEQ ID NO: 459 is the nucleotide sequence of a Primer Binding Site (PBS), a sequence to facilitate event screening.

[0185] SEQ ID NO: 460 is the nucleotide sequence of the Zm-GOS2 PRO-GOS2 INTRON, the maize GOS2 promoter and GOS2 intron1 including the promoter, 5′-UTR1, INTRON1 and 5′-UTR2.

[0186] SEQ ID NO:461 is the nucleotide sequence of the maize Zm-ARGOS8 promoter.

[0187] SEQ ID NO:462 is the nucleotide sequence of the maize Zm-ARGOS8 5′-UTR.

[0188] SEQ ID NO:463 is the nucleotide sequence of the maize Zm-ARGOS8 codon sequence

[0189] SEQ ID NO:464 is the nucleotide sequence of the maize Zm-GOS2 gene, including promoter, 5′-UTR, CDS, 3′-UTR and introns.

[0190] SEQ ID NO:465 is the nucleotide sequence of the maize Zm-GOS2 PRO promoter.

[0191] SEQ ID NO:466 is the nucleotide sequence of the maize GOS2 INTRON, maize GOS2 5′-UTR1 and intron1 and 5′-UTR2.

[0192] SEQ ID NOs: 467-468, 490-491, 503-504 are the nucleotide sequence of the soybean genomic Cas endonuclease target sequences soy EPSPS-CR1, soy EPSPS-CR2, soy EPSPS-CR4, soy EPSPS-CR5, soy EPSPS-CR6, soy EPSPS-CR7, respectively

[0193] SEQ ID NO:469 is the nucleotide sequence of the soybean U6 small nuclear RNA promoter GM-U6-13.1.

[0194] SEQ ID NOs:470, 471 are the nucleotide sequences of the QC868, QC879 plasmids, respectively.

[0195] SEQ ID NOs:472, 473, 492, 493, 494, 505, 506, 507 are the nucleotide sequences of the RTW1013A, RTW1012A, RTW1199, RTW1200, RTW1190A, RTW1201, RTW1202, RTW1192A respectively.

[0196] SEQ ID NOs:474-488, 495-402, 508-512 are the nucleotide sequences of primers and probes.

[0197] SEQ ID NO: 489 is the nucleotide sequence of the soybean codon optimized Cas9.

[0198] SEQ ID NO: 513 is the nucleotide sequence of the 35S enhancer.

[0199] SEQ ID NO: 514 is the nucleotide sequence of the 35S-CRTS for gRNA1 at 163-181 (including pam at 3′end).

[0200] SEQ ID NO: 515 is the nucleotide sequence of the 35S-CRTS for gRNA2 at 295-319 (including pam at 3′end).

[0201] SEQ ID NO: 516 is the nucleotide sequence of the 35S-CRT for gRNA3 at 331-350 (including pam at 3′end).

[0202] SEQ ID NO: 517 is the nucleotide sequence of the EPSPS-K90R template.

[0203] SEQ ID NO: 518 is the nucleotide sequence of the EPSPS-IME template. S

[0204] SEQ ID NO: 519 is the nucleotide sequence of the EPSPS-Tspliced template.

[0205] SEQ ID NO: 520 is the amino acid sequence of ZM-RAP2.7 peptide

[0206] SEQ ID NO: 521 is the nucleotide sequence zM-RAP2.7 coding DNA sequence

[0207] SEQ ID NOs: 522 is the amino acid sequence of ZM-NPK1B peptide

[0208] SEQ ID NO: 523 is the nucleotide sequence of the ZM-NPK1B coding DNA sequence

[0209] SEQ ID NOs: 524 is the nucleotide sequence of the RAB17 promoter

[0210] SEQ ID NOs: 525 is the amino acid sequence of the Maize FTM1.

[0211] SEQ ID NO: 526 is the nucleotide sequence of the Maize FTM1 coding DNA sequence.

[0212] SEQ ID NOs: 527-532 are the nucleotide sequences shown in FIGS. 34, 35 and 37.

[0213] SEQ ID NOs: 533-534 are the nucleotide sequences of the Southern genomic probe and Southern MoPAT probe of FIG. 38, respectively. SEQ ID NOs: 535-541 are the nucleotide sequences of the RF-FPCas-1, RF-FPCas-2, ALSCas-4, ALS modification repair template 804, ALS modification repair template 127, ALS Forward_primer and ALS Reverse_primer, respectively.

[0214] SEQ ID NOs: 542-549 are the nucleotide sequences of the soy ALS1-CR1, Cas9 target sequence, soy ALS2-CR2, Cas9 target sequence, QC880, QC881, RTW1026A, WOL900, Forward_primer, WOL578, Reverse_primer and WOL573, Forward_primer, respectively.

[0215] SEQ ID NO: 550 is the nucleotide sequence of a maize ALS protein.

[0216] SEQ ID NOs: 551-554 are the nucleotide sequences of the soy FAD2-1-CR1, Cas9 target sequence, soy FAD2-1-CR2, Cas9 target sequence, RTW1211 and RTW1212.

### DETAILED DESCRIPTION

[0217] The present disclosure includes compositions and methods for genome modification of a target sequence in the genome of a plant or plant cell, for selecting plants, for gene editing, and for inserting a polynucleotide of interest into the genome of a plant without incorporating a selectable transgene marker. The methods employ a guide polynucleotide/Cas endonuclease system, wherein the Cas endonuclease is guided by at least two guide polynucleotides to recognize and optionally introduce a double strand break at a specific first and second target site into the genome of a cell. The guide polynucleotide/Cas endonuclease system provides for an effective system for modifying target sites within the genome of a plant, plant cell or seed. Further provided are methods and compositions employing a guide polynucleotide/Cas endonuclease for editing a nucleotide sequence in the genome of a cell. Once a genomic target site is identified, a variety of methods can be employed to further modify the target sites such that they contain a variety of polynucleotides of interest. Breeding methods utilizing a two component guide RNA/Cas endonuclease system are also disclosed. Compositions and methods are also provided for editing a nucleotide sequence in the genome of a cell. The nucleotide sequence to be edited (the nucleotide sequence of interest) can be located within or outside a target site that is recognized by a Cas endonuclease.

[0218] CRISPR loci (Clustered Regularly Interspaced Short Palindromic Repeats) (also known as SPIDRs—SPacer Interspersed Direct Repeats) constitute a family of recently described DNA loci. CRISPR loci consist of short and highly conserved DNA repeats (typically 24 to 40 bp, repeated from 1 to 140 times—also referred to as CRISPR-repeats) which are partially palindromic. The repeated sequences (usually specific to a species) are interspaced by variable sequences of constant length (typically 20 to 58 bp depending on the CRISPR locus (WO2007/025097 published Mar. 1, 2007).

[0219] CRISPR loci were first recognized in E. coli (Ishino et al. (1987) J. Bacterial. 169:5429-5433; Nakata et al. (1989) J. Bacterial. 171:3553-3556). Similar interspersed short sequence repeats have been identified in Haloferax mediterranei, Streptococcus pyogenes, Anabaena, and Mycobacterium tuberculosis (Groenen et al. (1993) Mol. Microbiol. 10:1057-1065; Hoe et al. (1999) Emerg. Infect. Dis. 5:254-263; Masepohl et al. (1996) Biochim. Biophys. Acta 1307:26-30; Mojica et al. (1995) Mol. Microbiol. 17:85-93). The CRISPR loci differ from other SSRs by the structure of the repeats, which have been termed short regularly spaced repeats (SRSRs) (Janssen et al. (2002) OMICS J. Integ. Biol. 6:23-33; Mojica et al. (2000) Mol. Microbiol. 36:244-246). The repeats are short elements that occur in clusters, which are always regularly spaced by variable sequences of constant length (Mojica et al. (2000) Mol. Microbiol. 36:244-246).

[0220] Cas gene includes a gene that is generally coupled, associated or close to or in the vicinity of flanking CRISPR loci. The terms “Cas gene”, “CRISPR-associated (Cas) gene” are used interchangeably herein. A comprehensive review of the Cas protein family is presented in Haft et al. (2005) Computational Biology, PLoS Comput Biol 1(6): e60. doi:10.1371/journal.pcbi.0010060.

[0221] As described therein, 41 CRISPR-associated (Cas) gene families are described, in addition to the four previously known gene families. It shows that CRISPR systems belong to different classes, with different repeat patterns, sets of genes, and species ranges. The number of Cas genes at a given CRISPR locus can vary between species.

[0222] Cas endonuclease relates to a Cas protein encoded by a Cas gene, wherein said Cas protein is capable of introducing a double strand break into a DNA target sequence. The Cas endonuclease is guided by the guide polynucleotide to recognize and optionally introduce a double strand break at a specific target site into the genome of a cell. As used herein, the tem “guide polynucleotide/Cas endonuclease system” includes a complex of a Cas endonuclease and a guide polynucleotide that is capable of introducing a double strand break into a DNA target sequence. The Cas endonuclease unwinds the DNA duplex in close proximity of the genomic target site and cleaves both DNA strands upon recognition of a target sequence by a guide RNA, but only if the correct protospacer-adjacent motif (PAM) is approximately oriented at the 3′ end of the target sequence (FIG. 2A, FIG. 2B).

[0223] In one embodiment, the Cas endonuclease gene is a Cas9 endonuclease, such as but not limited to, Cas9 genes listed in SEQ ID NOs: 462, 474, 489, 494, 499, 505, and 518 of WO2007/025097 published Mar. 1, 2007, and incorporated herein by reference. In another embodiment, the Cas endonuclease gene is plant, maize or soybean optimized Cas9 endonuclease (FIG. 1 A). In another embodiment, the Cas endonuclease gene is operably linked to a SV40 nuclear targeting signal upstream of the Cas codon region and a bipartite VirD2 nuclear localization signal (Tinland et al. (1992) Proc. Natl. Acad. Sci. USA 89:7442-6) downstream of the Cas codon region.

[0224] In one embodiment, the Cas endonuclease gene is a Cas9 endonuclease gene of SEQ ID NO:1, 124, 212, 213, 214, 215, 216, 193 or nucleotides 2037-6329 of SEQ ID NO:5, or any functional fragment or variant thereof.

[0225] The terms “functional fragment”, “fragment that is functionally equivalent” and “functionally equivalent fragment” are used interchangeably herein. These terms refer to a portion or subsequence of the Cas endonuclease sequence of the present disclosure in which the ability to create a double-strand break is retained.

[0226] The terms “functional variant”, “Variant that is functionally equivalent” and “functionally equivalent variant” are used interchangeably herein. These terms refer to a variant of the Cas endonuclease of the present disclosure in which the ability create a double-strand break is retained. Fragments and variants can be obtained via methods such as site-directed mutagenesis and synthetic construction.

[0227] In one embodiment, the Cas endonuclease gene is a plant codon optimized streptococcus pyogenes Cas9 gene that can recognize any genomic sequence of the form N(12-30)NGG can in principle be targeted.

[0228] In one embodiment, the Cas endonuclease is introduced directly into a cell by any method known in the art, for example, but not limited to transient introduction methods, transfection and/or topical application.

[0229] Endonucleases are enzymes that cleave the phosphodiester bond within a polynucleotide chain, and include restriction endonucleases that cleave DNA at specific sites without damaging the bases. Restriction endonucleases include Type I, Type II, Type III, and Type IV endonucleases, which further include subtypes. In the Type I and Type III systems, both the methylase and restriction activities are contained in a single complex. Endonucleases also include meganucleases, also known as homing endonucleases (HEases), which like restriction endonucleases, bind and cut at a specific recognition site, however the recognition sites for meganucleases are typically longer, about 18 bp or more. (patent application WO-PCT PCT/US12/30061 filed on Mar. 22, 2012) Meganucleases have been classified into four families based on conserved sequence motifs, the families are the LAGLIDADG, GIY-YIG, H-N-H, and His-Cys box families. These motifs participate in the coordination of metal ions and hydrolysis of phosphodiester bonds. HEases are notable for their long recognition sites, and for tolerating some sequence polymorphisms in their DNA substrates. The naming convention for meganuclease is similar to the convention for other restriction endonuclease. Meganucleases are also characterized by prefix F-, I-, or PI- for enzymes encoded by free-standing ORFs, introns, and inteins, respectively. One step in the recombination process involves polynucleotide cleavage at or near the recognition site. This cleaving activity can be used to produce a double-strand break. For reviews of site-specific recombinases and their recognition sites, see, Sauer (1994) Curr Op Biotechnol 5:521-7; and Sadowski (1993) FASEB 7:760-7. In some examples the recombinase is from the Integrase or Resolvase families.

[0230] TAL effector nucleases are a new class of sequence-specific nucleases that can be used to make double-strand breaks at specific target sequences in the genome of a plant or other organism. (Miller et al. (2011) Nature Biotechnology 29:143-148). Zinc finger nucleases (ZFNs) are engineered double-strand break inducing agents comprised of a zinc finger DNA binding domain and a double-strand-break-inducing agent domain. Recognition site specificity is conferred by the zinc finger domain, which typically comprising two, three, or four zinc fingers, for example having a C2H2 structure, however other zinc finger structures are known and have been engineered. Zinc finger domains are amenable for designing polypeptides which specifically bind a selected polynucleotide recognition sequence. ZFNs include an engineered DNA-binding zinc finger domain linked to a non-specific endonuclease domain, for example nuclease domain from a Type IIs endonuclease such as FokI. Additional functionalities can be fused to the zinc-finger binding domain, including transcriptional activator domains, transcription repressor domains, and methylases. In some examples, dimerization of nuclease domain is required for cleavage activity. Each zinc finger recognizes three consecutive base pairs in the target DNA. For example, a 3 finger domain recognized a sequence of 9 contiguous nucleotides, with a dimerization requirement of the nuclease, two sets of zinc finger triplets are used to bind an 18 nucleotide recognition sequence.

[0231] Bacteria and archaea have evolved adaptive immune defenses termed clustered regularly interspaced short palindromic repeats (CRISPR)/CRISPR-associated (Cas) systems that use short RNA to direct degradation of foreign nucleic acids ((WO2007/025097 published Mar. 1, 2007). The type II CRISPR/Cas system from bacteria employs a crRNA and tracrRNA to guide the Cas endonuclease to its DNA target. The crRNA (CRISPR RNA) contains the region complementary to one strand of the double strand DNA target and base pairs with the tracrRNA (trans-activating CRISPR RNA) forming a RNA duplex that directs the Cas endonuclease to cleave the DNA target (FIG. 2 B).

[0232] As used herein, the term “guide RNA” includes a synthetic fusion of two RNA molecules, a crRNA (CRISPR RNA) comprising a variable targeting domain, and a tracrRNA (FIG. 2 B). In one embodiment, the guide RNA comprises a variable targeting domain of 12 to 30 nucleotide sequences and a RNA fragment that can interact with a Cas endonuclease.

[0233] As used herein, the term “guide polynucleotide”, includes a polynucleotide sequence that can form a complex with a Cas endonuclease and enables the Cas endonuclease to recognize and optionally cleave a DNA target site. The guide polynucleotide can be included a single molecule or a double molecule. The guide polynucleotide sequence can be a RNA sequence, a DNA sequence, or a combination thereof (a RNA-DNA combination sequence). Optionally, the guide polynucleotide can comprise at least one nucleotide, phosphodiester bond or linkage modification such as, but not limited, to Locked Nucleic Acid (LNA), 5-methyl dC, 2,6-Diaminopurine, 2′-Fluoro A, 2′-Fluoro U, 2′-O-Methyl RNA, phosphorothioate bond, linkage to a cholesterol molecule, linkage to a polyethylene glycol molecule, linkage to a spacer 18 (hexaethylene glycol chain) molecule, or 5′ to 3′ covalent linkage resulting in circularization. A guide polynucleotide that solely comprises ribonucleic acids is also referred to as a “guide RNA”.

[0234] The guide polynucleotide can be a double molecule (also referred to as duplex guide polynucleotide) comprising a first nucleotide sequence domain (referred to as Variable Targeting domain or VT domain) that is complementary to a nucleotide sequence in a target DNA and a second nucleotide sequence domain (referred to as as endonuclease recognition domain or CER domain) that interacts with a Cas endonuclease polypeptide. The CER domain of the double molecule guide polynucleotide comprises two separate molecules that are hybridized along a region of complementarity. The two separate molecules can be RNA, DNA, and/or RNA-DNA-combination sequences. In some embodiments, the first molecule of the duplex guide polynucleotide comprising a VT domain linked to a CER domain is referred to as “crDNA” (when composed of a contiguous stretch of DNA nucleotides) or “crRNA” (when composed of a contiguous stretch of RNA nucleotides), or “crDNA-RNA” (when composed of a combination of DNA and RNA nucleotides). The crNucleotide can comprise a fragment of the cRNA naturally occurring in Bacteria and Archaea. In one embodiment, the size of the fragment of the cRNA naturally occurring in Bacteria and Archaea that is present in a crNucleotide disclosed herein can range from, but is not limited to, 2, 3, 4, 5, 6, 7, 8, 9, 10, 11, 12, 13, 14, 15, 16, 17, 18, 19, 20 or more nucleotides. In some embodiments the second molecule of the duplex guide polynucleotide comprising a CER domain is referred to as “tracrRNA” (when composed of a contiguous stretch of RNA nucleotides) or “tracrDNA” (when composed of a contiguous stretch of DNA nucleotides) or “tracrDNA-RNA” (when composed of a combination of DNA and RNA nucleotides In one embodiment, the RNA that guides the RNA/Cas9 endonuclease complex, is a duplexed RNA comprising a duplex crRNA-tracrRNA.

[0235] The guide polynucleotide can also be a single molecule comprising a first nucleotide sequence domain (referred to as Variable Targeting domain or VT domain) that is complementary to a nucleotide sequence in a target DNA and a second nucleotide domain (referred to as Cas endonuclease recognition domain or CER domain) that interacts with a Cas endonuclease polypeptide. By “domain” it is meant a contiguous stretch of nucleotides that can be RNA, DNA, and/or RNA-DNA-combination sequence. The VT domain and/or the CER domain of a single guide polynucleotide can comprise a RNA sequence, a DNA sequence, or a RNA-DNA-combination sequence. In some embodiments the single guide polynucleotide comprises a crNucleotide (comprising a VT domain linked to a CER domain) linked to a tracrNucleotide (comprising a CER domain), wherein the linkage is a nucleotide sequence comprising a RNA sequence, a DNA sequence, or a RNA-DNA combination sequence. The single guide polynucleotide being comprised of sequences from the crNucleotide and tracrNucleotide may be referred to as “single guide RNA” (when composed of a contiguous stretch of RNA nucleotides) or “single guide DNA” (when composed of a contiguous stretch of DNA nucleotides) or “single guide RNA-DNA” (when composed of a combination of RNA and DNA nucleotides). In one embodiment of the disclosure, the single guide RNA comprises a cRNA or cRNA fragment and a tracrRNA or tracrRNA fragment of the type II CRISP R/Cas system that can form a complex with a type II Cas endonuclease, wherein said guide RNA/Cas endonuclease complex can direct the Cas endonuclease to a plant genomic target site, enabling the Cas endonuclease to introduce a double strand break into the genomic target site. One aspect of using a single guide polynucleotide versus a duplex guide polynucleotide is that only one expression cassette needs to be made to express the single guide polynucleotide.

[0236] The term “variable targeting domain” or “VT domain” is used interchangeably herein and includes a nucleotide sequence that is complementary to one strand (nucleotide sequence) of a double strand DNA target site (FIGS. 2 A and 2 B). The % complementation between the first nucleotide sequence domain (VT domain) and the target sequence can be at least 50%, 51%, 52%, 53%, 54%, 55%, 56%, 57%, 58%, 59%, 60%, 61%, 62%, 63%, 63%, 65%, 66%, 67%, 68%, 69%, 70%, 71%, 72%, 73%, 74%, 75%, 76%, 77%, 78%, 79%, 80%, 81%, 82%, 83%, 84%, 85%, 86%, 87%, 88%, 89%, 90%, 91%, 92%, 93%, 94%, 95%, 96%, 97%, 98%, 99% or 100%. The variable target domain can be at least 12, 13, 14, 15, 16, 17, 18, 19, 20, 21, 22, 23, 24, 25, 26, 27, 28, 29 or 30 nucleotides in length. In some embodiments, the variable targeting domain comprises a contiguous stretch of 12 to 30 nucleotides. The variable targeting domain can be composed of a DNA sequence, a RNA sequence, a modified DNA sequence, a modified RNA sequence, or any combination thereof.

[0237] The term “Cas endonuclease recognition domain” or “CER domain” of a guide polynucleotide is used interchangeably herein and includes a nucleotide sequence (such as a second nucleotide sequence domain of a guide polynucleotide), that interacts with a Cas endonuclease polypeptide. The CER domain can be composed of a DNA sequence, a RNA sequence, a modified DNA sequence, a modified RNA sequence (see for example modifications described herein), or any combination thereof.

[0238] The nucleotide sequence linking the crNucleotide and the tracrNucleotide of a single guide polynucleotide can comprise a RNA sequence, a DNA sequence, or a RNA-DNA combination sequence. In one embodiment, the nucleotide sequence linking the crNucleotide and the tracrNucleotide of a single guide polynucleotide can be at least 3, 4, 5, 6, 7, 8, 9, 10, 11, 12, 13, 14, 15, 16, 17, 18, 19, 20, 21, 22, 23, 24, 25, 26, 27, 28, 29, 30, 31, 32, 33, 34, 35, 36, 37, 38, 39, 40, 41, 42, 43, 44, 45, 46, 47, 48, 49, 50, 51, 52, 53, 54, 55, 56, 57, 58, 59, 60, 61, 62, 63, 64, 65, 66, 67, 68, 69, 70, 71, 72, 73, 74, 75, 76, 77, 78, 78, 79, 80, 81, 82, 83, 84, 85, 86, 87, 88, 89, 90, 91, 92, 93, 94, 95, 96, 97, 98, 99 or 100 nucleotides in length. In another embodiment, the nucleotide sequence linking the crNucleotide and the tracrNucleotide of a single guide polynucleotide can comprise a tetraloop sequence, such as, but not limiting to a GAAA tetraloop sequence.

[0239] Nucleotide sequence modification of the guide polynucleotide, VT domain and/or CER domain can be selected from, but not limited to, the group consisting of a 5′ cap, a 3′ polyadenylated tail, a riboswitch sequence, a stability control sequence, a sequence that forms a dsRNA duplex, a modification or sequence that targets the guide poly nucleotide to a subcellular location, a modification or sequence that provides for tracking, a modification or sequence that provides a binding site for proteins, a Locked Nucleic Acid (LNA), a 5-methyl dC nucleotide, a 2,6-Diaminopurine nucleotide, a 2′-Fluoro A nucleotide, a 2′-Fluoro U nucleotide; a 2′-O-Methyl RNA nucleotide, a phosphorothioate bond, linkage to a cholesterol molecule, linkage to a polyethylene glycol molecule, linkage to a spacer 18 molecule, a 5′ to 3′ covalent linkage, or any combination thereof. These modifications can result in at least one additional beneficial feature, wherein the additional beneficial feature is selected from the group of a modified or regulated stability, a subcellular targeting, tracking, a fluorescent label, a binding site for a protein or protein complex, modified binding affinity to complementary target sequence, modified resistance to cellular degradation, and increased cellular permeability.

[0240] In one embodiment, the guide RNA and Cas endonuclease are capable of forming a complex that enables the Cas endonuclease to introduce a double strand break at a DNA target site

[0241] In one embodiment of the disclosure the variable target domain is 12, 13, 14, 15, 16, 17, 18, 19, 20, 21, 22, 23, 24, 25, 26, 27, 28, 29 or 30 nucleotides in length.

[0242] In one embodiment of the disclosure, the guide RNA comprises a cRNA (or cRNA fragment) and a tracrRNA (or tracrRNA fragment) of the type II CRISPR/Cas system that can form a complex with a type II Cas endonuclease, wherein said guide RNA/Cas endonuclease complex can direct the Cas endonuclease to a plant genomic target site, enabling the Cas endonuclease to introduce a double strand break into the genomic target site.

[0243] In one embodiment the guide RNA can be introduced into a plant or plant cell directly using any method known in the art such as, but not limited to, particle bombardment or topical applications.

[0244] In another embodiment the guide RNA can be introduced indirectly by introducing a recombinant DNA molecule comprising the corresponding guide DNA sequence operably linked to a plant specific promoter (as shown in FIG. 1 B) that is capable of transcribing the guide RNA in said plant cell. The term “corresponding guide DNA” includes a DNA molecule that is identical to the RNA molecule but has a “T” substituted for each “U” of the RNA molecule.

[0245] In some embodiments, the guide RNA is introduced via particle bombardment or Agrobacterium transformation of a recombinant DNA construct comprising the corresponding guide DNA operably linked to a plant U6 polymerase III promoter.

[0246] In one embodiment, the RNA that guides the RNA/Cas9 endonuclease complex, is a duplexed RNA comprising a duplex crRNA-tracrRNA (as shown in FIG. 2B). One advantage of using a guide RNA versus a duplexed crRNA-tracrRNA is that only one expression cassette needs to be made to express the fused guide RNA.

[0247] The terms “target site”, “target sequence”, “target DNA”, “target locus”, “genomic target site”, “genomic target sequence”, and “genomic target locus” are used interchangeably herein and refer to a polynucleotide sequence in the genome (including choloroplastic and mitochondrial DNA) of a plant cell at which a double-strand break is induced in the plant cell genome by a Cas endonuclease. The target site can be an endogenous site in the plant genome, or alternatively, the target site can be heterologous to the plant and thereby not be naturally occurring in the genome, or the target site can be found in a heterologous genomic location compared to where it occurs in nature. As used herein, terms “endogenous target sequence” and “native target sequence” are used interchangeable herein to refer to a target sequence that is endogenous or native to the genome of a plant and is at the endogenous or native position of that target sequence in the genome of the plant.

[0248] In one embodiments, the target site can be similar to a DNA recognition site or target site that that is specifically recognized and/or bound by a double-strand break inducing agent such as a LIG3-4 endonuclease (US patent publication 2009-0133152 A1 (published May 21, 2009) or a MS26++ meganuclease (U.S. patent application Ser. No. 13/526,912 filed Jun. 19, 2012).

[0249] An “artificial target site” or “artificial target sequence” are used interchangeably herein and refer to a target sequence that has been introduced into the genome of a plant. Such an artificial target sequence can be identical in sequence to an endogenous or native target sequence in the genome of a plant but be located in a different position (i.e., a non-endogenous or non-native position) in the genome of a plant.

[0250] An “altered target site”, “altered target sequence”, “modified target site”, “modified target sequence” are used interchangeably herein and refer to a target sequence as disclosed herein that comprises at least one alteration when compared to non-altered target sequence. Such “alterations” include, for example: (i) replacement of at least one nucleotide, (ii) a deletion of at least one nucleotide, (iii) an insertion of at least one nucleotide, or (iv) any combination of (i)-(iii).

[0251] Methods for modifying a plant genomic target site are disclosed herein. In one embodiment, the method comprises a method for producing a genetic modification into a second gene of a plant genome without introducing an exogenous selectable marker into said plant genome, the method comprising providing a first guide polynucleotide, a polynucleotide modification template, a second guide polynucleotide, and a Cas endonuclease to a plant cell comprising a first endogenous gene that can be modified to confer herbicide resistance, wherein said first guide polynucleotide and Cas endonuclease are capable of forming a first complex that enables the Cas endonuclease to introduce a double strand break at a first target site, located in or near said first endogenous gene in the genome of said plant cell, wherein said second guide polynucleotide and Cas endonuclease are capable of forming a second complex that enables the Cas endonuclease to introduce a double strand break at a second target site in the genome of said plant cell, wherein said polynucleotide modification template comprises at least one nucleotide alteration when compared to the first endogenous gene.

[0252] Also provided is a method for modifying a target site in the genome of a plant cell, the method comprising introducing a guide RNA and a Cas endonuclease into said plant, wherein said guide RNA and Cas endonuclease are capable of forming a complex that enables the Cas endonuclease to introduce a double strand break at said target site.

[0253] Further provided is a method for modifying a target site in the genome of a plant cell, the method comprising introducing a guide RNA and a donor DNA into a plant cell having a Cas endonuclease, wherein said guide RNA and Cas endonuclease are capable of forming a complex that enables the Cas endonuclease to introduce a double strand break at said target site, wherein said donor DNA comprises a polynucleotide of interest.

[0254] Further provided is a method for modifying a target site in the genome of a plant cell, the method comprising: a) introducing into a plant cell a guide RNA comprising a variable targeting domain and a Cas endonuclease, wherein said guide RNA and Cas endonuclease are capable of forming a complex that enables the Cas endonuclease to introduce a double strand break at said target site; and, b) identifying at least one plant cell that has a modification at said target, wherein the modification includes at least one deletion or substitution of one or more nucleotides in said target site.

[0255] Further provided, a method for modifying a target DNA sequence in the genome of a plant cell, the method comprising: a) introducing into a plant cell a first recombinant DNA construct capable of expressing a guide RNA and a second recombinant DNA construct capable of expressing a Cas endonuclease, wherein said guide RNA and Cas endonuclease are capable of forming a complex that enables the Cas endonuclease to introduce a double strand break at said target site; and, b) identifying at least one plant cell that has a modification at said target, wherein the modification includes at least one deletion or substitution of one or more nucleotides in said target site.

[0256] The length of the target site can vary, and includes, for example, target sites that are at least 12, 13, 14, 15, 16, 17, 18, 19, 20, 21, 22, 23, 24, 25, 26, 27, 28, 29, 30 or more nucleotides in length. It is further possible that the target site can be palindromic, that is, the sequence on one strand reads the same in the opposite direction on the complementary strand. The nick/cleavage site can be within the target sequence or the nick/cleavage site could be outside of the target sequence. In another variation, the cleavage could occur at nucleotide positions immediately opposite each other to produce a blunt end cut or, in other Cases, the incisions could be staggered to produce single-stranded overhangs, also called “sticky ends”, which can be either 5′ overhangs, or 3′ overhangs.

[0257] In some embodiment, the genomic target site capable of being cleaved by a Cas endonuclease comprises a 12 to 30 nucleotide fragment of a male fertility gene such as MS26 (see for example U.S. Pat. Nos. 7,098,388, 7,517,975, 7,612,251), MS45 (see for example U.S. Pat. Nos. 5,478,369, 6,265,640) or MSCA1 (see for example U.S. Pat. No. 7,919,676), ALS or ESPS genes.

[0258] Active variants of genomic target sites can also be used. Such active variants can comprise at least 65%, 70%, 75%, 80%, 85%, 90%, 91%, 92%, 93%, 94%, 95%, 96%, 97%, 98%, 99% or more sequence identity to the given target site, wherein the active variants retain biological activity and hence are capable of being recognized and cleaved by an Cas endonuclease. Assays to measure the double-strand break of a target site by an endonuclease are known in the art and generally measure the overall activity and specificity of the agent on DNA substrates containing recognition sites.

[0259] Various methods and compositions can be employed to obtain a plant having a polynucleotide of interest inserted in a target site for a Cas endonuclease. Such methods can employ homologous recombination to provide integration of the polynucleotide of Interest at the target site. In one method provided, a polynucleotide of interest is provided to the plant cell in a donor DNA construct. As used herein, “donor DNA” is a DNA construct that comprises a polynucleotide of Interest to be inserted into the target site of a Cas endonuclease. The donor DNA construct further comprises a first and a second region of homology that flank the polynucleotide of Interest. The first and second regions of homology of the donor DNA share homology to a first and a second genomic region, respectively, present in or flanking the target site of the plant genome. By “homology” is meant DNA sequences that are similar. For example, a “region of homology to a genomic region” that is found on the donor DNA is a region of DNA that has a similar sequence to a given “genomic region” in the plant genome. A region of homology can be of any length that is sufficient to promote homologous recombination at the cleaved target site. For example, the region of homology can comprise at least 5-10, 5-15, 5-20, 5-25, 5-30, 5-35, 5-40, 5-45, 5-50, 5-55, 5-60, 5-65, 5-70, 5-75, 5-80, 5-85, 5-90, 5-95, 5-100, 5-200, 5-300, 5-400, 5-500, 5-600, 5-700, 5-800, 5-900, 5-1000, 5-1100, 5-1200, 5-1300, 5-1400, 5-1500, 5-1600, 5-1700, 5-1800, 5-1900, 5-2000, 5-2100, 5-2200, 5-2300, 5-2400, 5-2500, 5-2600, 5-2700, 5-2800. 5-2900, 5-3000, 5-3100 or more bases in length such that the region of homology has sufficient homology to undergo homologous recombination with the corresponding genomic region. “Sufficient homology” indicates that two polynucleotide sequences have sufficient structural similarity to act as substrates for a homologous recombination reaction. The structural similarity includes overall length of each polynucleotide fragment, as well as the sequence similarity of the polynucleotides. Sequence similarity can be described by the percent sequence identity over the whole length of the sequences, and/or by conserved regions comprising localized similarities such as contiguous nucleotides having 100% sequence identity, and percent sequence identity over a portion of the length of the sequences.

[0260] The amount of homology or sequence identity shared by a target and a donor polynucleotide can vary and includes total lengths and/or regions having unit integral values in the ranges of about 1-20 bp, 20-50 bp, 50-100 bp, 75-150 bp, 100-250 bp, 150-300 bp, 200-400 bp, 250-500 bp, 300-600 bp, 350-750 bp, 400-800 bp, 450-900 bp, 500-1000 bp, 600-1250 bp, 700-1500 bp, 800-1750 bp, 900-2000 bp, 1-2.5 kb, 1.5-3 kb, 2-4 kb, 2.5-5 kb, 3-6 kb, 3.5-7 kb, 4-8 kb, 5-10 kb, or up to and including the total length of the target site. These ranges include every integer within the range, for example, the range of 1-20 bp includes 1, 2, 3, 4, 5, 6, 7, 8, 9, 10, 11, 12, 13, 14, 15, 16, 17, 18, 19 and 20 bp. The amount of homology can also described by percent sequence identity over the full aligned length of the two polynucleotides which includes percent sequence identity of about at least 50%, 55%, 60%, 65%, 70%, 71%, 72%, 73%, 74%, 75%, 76%, 77%, 78%, 79%, 80%, 81%, 82%, 83%, 84%, 85%, 86%, 87%, 88%, 89%, 90%, 91%, 92%, 93%, 94%, 95%, 96%, 97%, 98%, 99% or 100%. Sufficient homology includes any combination of polynucleotide length, global percent sequence identity, and optionally conserved regions of contiguous nucleotides or local percent sequence identity, for example sufficient homology can be described as a region of 75-150 bp having at least 80% sequence identity to a region of the target locus. Sufficient homology can also be described by the predicted ability of two polynucleotides to specifically hybridize under high stringency conditions, see, for example, Sambrook et al., (1989) Molecular Cloning: A Laboratory Manual, (Cold Spring Harbor Laboratory Press, NY); Current Protocols in Molecular Biology, Ausubel et al., Eds (1994) Current Protocols, (Greene Publishing Associates, Inc. and John Wiley & Sons, Inc); and, Tijssen (1993) Laboratory Techniques in Biochemistry and Molecular Biology—Hybridization with Nucleic Acid Probes, (Elsevier, New York).

[0261] As used herein, a “genomic region” is a segment of a chromosome in the genome of a plant cell that is present on either side of the target site or, alternatively, also comprises a portion of the target site. The genomic region can comprise at least 5-10, 5-15, 5-20, 5-25, 5-30, 5-35, 5-40, 5-45, 5-50, 5-55, 5-60, 5-65, 5-70, 5-75, 5-80, 5-85, 5-90, 5-95, 5-100, 5-200, 5-300, 5-400, 5-500, 5-600, 5-700, 5-800, 5-900, 5-1000, 5-1100, 5-1200, 5-1300, 5-1400, 5-1500, 5-1600, 5-1700, 5-1800, 5-1900, 5-2000, 5-2100, 5-2200, 5-2300, 5-2400, 5-2500, 5-2600, 5-2700, 5-2800. 5-2900, 5-3000, 5-3100 or more bases such that the genomic region has sufficient homology to undergo homologous recombination with the corresponding region of homology.

[0262] Polynucleotides of interest and/or traits can be stacked together in a complex trait locus as described in US-2013-0263324-A1, published 3 Oct. 2013 and in PCT/US13/22891, published Jan. 24, 2013, both applications are hereby incorporated by reference. The guide polynucleotide/Cas9 endonuclease system described herein provides for an efficient system to generate double strand breaks and allows for traits to be stacked in a complex trait locus.

[0263] In one embodiment, the guide polynucleotide/Cas endonuclease system is used for introducing one or more polynucleotides of interest or one or more traits of interest into one or more target sites by providing one or more guide polynucleotides, one Cas endonuclease, and optionally one or more donor DNAs to a plant cell without incorporating a selectable transgene marker. A fertile plant can be produced from that plant cell that comprises an alteration at said one or more target sites, wherein the alteration is selected from the group consisting of (i) replacement of at least one nucleotide, (ii) a deletion of at least one nucleotide, (iii) an insertion of at least one nucleotide, and (iv) any combination of (i)-(iii). Plants comprising these altered target sites can be crossed with plants comprising at least one gene or trait of interest in the same complex trait locus, thereby further stacking traits in said complex trait locus. (see also US-2013-0263324-A1, published 3 Oct. 2013 and in PCT/US13/22891, published Jan. 24, 2013).

[0264] In one embodiment, the method comprises a method for producing in a plant a complex trait locus without incorporating a selectable transgene marker comprising at least two altered target sequences in a genomic region of interest, said method comprising: (a) selecting a genomic region in a plant, wherein the genomic region comprises a first target sequence and a second target sequence; (b) contacting at least one plant cell with at least a first guide polynucleotide, a second polynucleotide, and optionally at least one donor DNA, and a Cas endonuclease, wherein the first and second guide polynucleotide and the Cas endonuclease can form a complex that enables the Cas endonuclease to introduce a double strand break in at least a first and a second target sequence; (c) identifying a cell from (b) comprising a first alteration at the first target sequence and a second alteration at the second target sequence; and (d) recovering a first fertile plant from the cell of (c) said fertile plant comprising the first alteration and the second alteration, wherein the first alteration and the second alteration are physically linked.

[0265] In one embodiment, the method comprises a method for producing in a plant a complex trait locus without incorporating a selectable transgene marker comprising at least two altered target sequences in a genomic region of interest, said method comprising: (a) selecting a genomic region in a plant, wherein the genomic region comprises a first target sequence and a second target sequence; (b) contacting at least one plant cell with a first guide polynucleotide, a Cas endonuclease, and optionally a first donor DNA, wherein the first guide polynucleotide and the Cas endonuclease can form a complex that enables the Cas endonuclease to introduce a double strand break a first target sequence; (c) identifying a cell from (b) comprising a first alteration at the first target sequence; (d) recovering a first fertile plant from the cell of (c), said first fertile plant comprising the first alteration; (e) contacting at least one plant cell with a second guide polynucleotide, a Cas endonuclease and optionally a second Donor DNA; (f) identifying a cell from (e) comprising a second alteration at the second target sequence; (g) recovering a second fertile plant from the cell of (f), said second fertile plant comprising the second alteration; and, (h) obtaining a fertile progeny plant from the second fertile plant of (g), said fertile progeny plant comprising the first alteration and the second alteration, wherein the first alteration and the second alteration are physically linked.

[0266] The structural similarity between a given genomic region and the corresponding region of homology found on the donor DNA can be any degree of sequence identity that allows for homologous recombination to occur. For example, the amount of homology or sequence identity shared by the “region of homology” of the donor DNA and the “genomic region” of the plant genome can be at least 50%, 55%, 60%, 65%, 70%, 75%, 80%, 81%, 82%, 83%, 84%, 85%, 86%, 87%, 88%, 89%, 90%, 91%, 92%, 93%, 94%, 95%, 96%, 97%, 98%, 99% or 100% sequence identity, such that the sequences undergo homologous recombination

[0267] The region of homology on the donor DNA can have homology to any sequence flanking the target site. While in some embodiments the regions of homology share significant sequence homology to the genomic sequence immediately flanking the target site, it is recognized that the regions of homology can be designed to have sufficient homology to regions that may be further 5′ or 3′ to the target site. In still other embodiments, the regions of homology can also have homology with a fragment of the target site along with downstream genomic regions. In one embodiment, the first region of homology further comprises a first fragment of the target site and the second region of homology comprises a second fragment of the target site, wherein the first and second fragments are dissimilar.

[0268] As used herein, “homologous recombination” includes the exchange of DNA fragments between two DNA molecules at the sites of homology. The frequency of homologous recombination is influenced by a number of factors. Different organisms vary with respect to the amount of homologous recombination and the relative proportion of homologous to non-homologous recombination. Generally, the length of the region of homology affects the frequency of homologous recombination events: the longer the region of homology, the greater the frequency. The length of the homology region needed to observe homologous recombination is also species-variable. In many cases, at least 5 kb of homology has been utilized, but homologous recombination has been observed with as little as 25-50 bp of homology. See, for example, Singer et al., (1982) Cell 31:25-33; Shen and Huang, (1986) Genetics 112:441-57; Watt et al., (1985) Proc. Natl. Acad. Sci. USA 82:4768-72, Sugawara and Haber, (1992) Mol Cell Biol 12:563-75, Rubnitz and Subramani, (1984) Mol Cell Biol 4:2253-8; Ayares et al., (1986) Proc. Natl. Acad. Sci. USA 83:5199-203; Liskay et al., (1987) Genetics 115:161-7.

[0269] Homology-directed repair (HDR) is a mechanism in cells to repair double-stranded and single stranded DNA breaks. Homology-directed repair includes homologous recombination (HR) and single-strand annealing (SSA) (Lieber. 2010 Annu. Rev. Biochem. 79:181-211). The most common form of HDR is called homologous recombination (HR), which has the longest sequence homology requirements between the donor and acceptor DNA. Other forms of HDR include single-stranded annealing (SSA) and breakage-induced replication, and these require shorter sequence homology relative to HR. Homology-directed repair at nicks (single-stranded breaks) can occur via a mechanism distinct from HDR at double-strand breaks (Davis and Maizels. PNAS(0027-8424), 111 (10), p. E924-E932.

[0270] Alteration of the genome of a plant cell, for example, through homologous recombination (HR), is a powerful tool for genetic engineering. Despite the low frequency of homologous recombination in higher plants, there are a few examples of successful homologous recombination of plant endogenous genes. The parameters for homologous recombination in plants have primarily been investigated by rescuing introduced truncated selectable marker genes. In these experiments, the homologous DNA fragments were typically between 0.3 kb to 2 kb. Observed frequencies for homologous recombination were on the order of 10⁻⁴ to 10⁻⁵. See, for example, Halfter et al., (1992) Mol Gen Genet 231:186-93; Offringa et al., (1990) EMBO J 9:3077-84; Offringa et al., (1993) Proc. Natl. Acad. Sci. USA 90:7346-50; Paszkowski et al., (1988) EMBO J 7:4021-6; Hourda and Paszkowski, (1994) Mol Gen Genet 243:106-11; and Risseeuw et al., (1995) Plant J 7:109-19.

[0271] Homologous recombination has been demonstrated in insects. In Drosophila, Dray and Gloor found that as little as 3 kb of total template:target homology sufficed to copy a large non-homologous segment of DNA into the target with reasonable efficiency (Dray and Gloor, (1997) Genetics 147:689-99). Using FLP-mediated DNA integration at a target FRT in Drosophila, Golic et al., showed integration was approximately 10-fold more efficient when the donor and target shared 4.1 kb of homology as compared to 1.1 kb of homology (Golic et al., (1997) Nucleic Acids Res 25:3665). Data from Drosophila indicates that 2-4 kb of homology is sufficient for efficient targeting, but there is some evidence that much less homology may suffice, on the order of about 30 bp to about 100 bp (Nassif and Engels, (1993) Proc. Natl. Acad. Sci. USA 90:1262-6; Keeler and Gloor, (1997) Mol Cell Biol 17:627-34).

[0272] Homologous recombination has also been accomplished in other organisms. For example, at least 150-200 bp of homology was required for homologous recombination in the parasitic protozoan Leishmania (Papadopoulou and Dumas, (1997) Nucleic Acids Res 25:4278-86). In the filamentous fungus Aspergillus nidulans, gene replacement has been accomplished with as little as 50 bp flanking homology (Chaveroche et al., (2000) Nucleic Acids Res 28:e97). Targeted gene replacement has also been demonstrated in the ciliate Tetrahymena thermophila (Gaertig et al., (1994) Nucleic Acids Res 22:5391-8). In mammals, homologous recombination has been most successful in the mouse using pluripotent embryonic stem cell lines (ES) that can be grown in culture, transformed, selected and introduced into a mouse embryo. Embryos bearing inserted transgenic ES cells develop as genetically offspring. By interbreeding siblings, homozygous mice carrying the selected genes can be obtained. An overview of the process is provided in Watson et al., (1992) Recombinant DNA, 2nd Ed., (Scientific American Books distributed by WH Freeman & Co.); Capecchi, (1989) Trends Genet 5:70-6; and Bronson, (1994) J Biol Chem 269:27155-8. Homologous recombination in mammals other than mouse has been limited by the lack of stem cells capable of being transplanted to oocytes or developing embryos. However, McCreath et al., Nature 405:1066-9 (2000) reported successful homologous recombination in sheep by transformation and selection in primary embryo fibroblast cells.

[0273] Error-prone DNA repair mechanisms can produce mutations at double-strand break sites. The nonhomologous end-joining (NHEJ) pathways are the most common repair mechanism to bring the broken ends together (Bleuyard et al., (2006) DNA Repair 5:1-12). The structural integrity of chromosomes is typically preserved by the repair, but deletions, insertions, or other rearrangements are possible. The two ends of one double-strand break are the most prevalent substrates of NHEJ (Kirik et al., (2000) EMBO J 19:5562-6), however if two different double-strand breaks occur, the free ends from different breaks can be ligated and result in chromosomal deletions (Siebert and Puchta, (2002) Plant Cell 14:1121-31), or chromosomal translocations between different chromosomes (Pacher et al., (2007) Genetics 175:21-9).

[0274] Episomal DNA molecules can also be ligated into the double-strand break, for example, integration of T-DNAs into chromosomal double-strand breaks (Chilton and Que, (2003) Plant Physiol 133:956-65; Salomon and Puchta, (1998) EMBO J 17:6086-95). Once the sequence around the double-strand breaks is altered, for example, by exonuclease activities involved in the maturation of double-strand breaks, gene conversion pathways can restore the original structure if a homologous sequence is available, such as a homologous chromosome in non-dividing somatic cells, or a sister chromatid after DNA replication (Molinier et al., (2004) Plant Cell 16:342-52). Ectopic and/or epigenic DNA sequences may also serve as a DNA repair template for homologous recombination (Puchta, (1999) Genetics 152:1173-81).

[0275] Once a double-strand break is induced in the DNA, the cell's DNA repair mechanism is activated to repair the break. Error-prone DNA repair mechanisms can produce mutations at double-strand break sites. The most common repair mechanism to bring the broken ends together is the nonhomologous end-joining (NHEJ) pathway (Bleuyard et al., (2006) DNA Repair 5:1-12). The structural integrity of chromosomes is typically preserved by the repair, but deletions, insertions, or other rearrangements are possible (Siebert and Puchta, (2002) Plant Cell 14:1121-31; Pacher et al., (2007) Genetics 175:21-9).

[0276] Alternatively, the double-strand break can be repaired by homologous recombination between homologous DNA sequences. Once the sequence around the double-strand break is altered, for example, by exonuclease activities involved in the maturation of double-strand breaks, gene conversion pathways can restore the original structure if a homologous sequence is available, such as a homologous chromosome in non-dividing somatic cells, or a sister chromatid after DNA replication (Molinier et al., (2004) Plant Cell 16:342-52). Ectopic and/or epigenic DNA sequences may also serve as a DNA repair template for homologous recombination (Puchta, (1999) Genetics 152:1173-81).

[0277] DNA double-strand breaks appear to be an effective factor to stimulate homologous recombination pathways (Puchta et al., (1995) Plant Mol Biol 28:281-92; Tzfira and White, (2005) Trends Biotechnol 23:567-9; Puchta, (2005) J Exp Bot 56:1-14). Using DNA-breaking agents, a two- to nine-fold increase of homologous recombination was observed between artificially constructed homologous DNA repeats in plants (Puchta et al., (1995) Plant Mol Biol 28:281-92). In maize protoplasts, experiments with linear DNA molecules demonstrated enhanced homologous recombination between plasmids (Lyznik et al., (1991) Mol Gen Genet 230:209-18).

[0278] In one embodiment provided herein, the method comprises contacting a plant cell with the donor DNA and the endonuclease. Once a double-strand break is introduced in the target site by the endonuclease, the first and second regions of homology of the donor DNA can undergo homologous recombination with their corresponding genomic regions of homology resulting in exchange of DNA between the donor and the genome. As such, the provided methods result in the integration of the polynucleotide of interest of the donor DNA into the double-strand break in the target site in the plant genome, thereby altering the original target site and producing an altered genomic target site.

[0279] The donor DNA may be introduced by any means known in the art. For example, a plant having a target site is provided. The donor DNA may be provided by any transformation method known in the art including, for example, Agrobacterium-mediated transformation or biolistic particle bombardment. The donor DNA may be present transiently in the cell or it could be introduced via a viral replicon. In the presence of the Cas endonuclease and the target site, the donor DNA is inserted into the transformed plant's genome.

[0280] Another approach uses protein engineering of existing homing endonucleases to alter their target specificities. Homing endonucleases, such as I-SceI or I-CreI, bind to and cleave relatively long DNA recognition sequences (18 bp and 22 bp, respectively). These sequences are predicted to naturally occur infrequently in a genome, typically only 1 or 2 sites/genome. The cleavage specificity of a homing endonuclease can be changed by rational design of amino acid substitutions at the DNA binding domain and/or combinatorial assembly and selection of mutated monomers (see, for example, Arnould et al., (2006) J Mol Biol 355:443-58; Ashworth et al., (2006) Nature 441:656-9; Doyon et al., (2006) J Am Chem Soc 128:2477-84; Rosen et al., (2006) Nucleic Acids Res 34:4791-800; and Smith et al., (2006) Nucleic Acids Res 34:e149; Lyznik et al., (2009) U.S. Patent Application Publication No. 20090133152A1; Smith et al., (2007) U.S. Patent Application Publication No. 20070117128A1). Engineered meganucleases have been demonstrated that can cleave cognate mutant sites without broadening their specificity. An artificial recognition site specific to the wild type yeast I-SceI homing nuclease was introduced in maize genome and mutations of the recognition sequence were detected in 1% of analyzed F1 plants when a transgenic I-SceI was introduced by crossing and activated by gene excision (Yang et al., (2009) Plant Mol Biol 70:669-79). More practically, the maize liguleless locus was targeted using an engineered single-chain endonuclease designed based on the I-CreI meganuclease sequence. Mutations of the selected liguleless locus recognition sequence were detected in 3% of the T0 transgenic plants when the designed homing nuclease was introduced by Agrobacterium-mediated transformation of immature embryos (Gao et al., (2010) Plant J 61:176-87).

[0281] Polynucleotides of interest are further described herein and are reflective of the commercial markets and interests of those involved in the development of the crop. Crops and markets of interest change, and as developing nations open up world markets, new crops and technologies will emerge also. In addition, as our understanding of agronomic traits and characteristics such as yield and heterosis increase, the choice of genes for genetic engineering will change accordingly.

[0282] Genome Editing Using the Guide RNA/Cas Endonuclease System

[0283] As described herein, the guide RNA/Cas endonuclease system can be used in combination with a co-delivered polynucleotide modification template to allow for editing of a genomic nucleotide sequence of interest. Also, as described herein, for each embodiment that uses a guide RNA/Cas endonuclease system, a similar guide polynucleotide/Cas endonuclease system can be deployed where the guide polynucleotide does not solely comprise ribonucleic acids but wherein the guide polynucleotide comprises a combination of RNA-DNA molecules or solely comprise DNA molecules.

[0284] While numerous double-strand break-making systems exist, their practical applications for gene editing may be restricted due to the relatively low frequency of induced double-strand breaks (DSBs). To date, many genome modification methods rely on the homologous recombination system. Homologous recombination (HR) can provide molecular means for finding genomic DNA sequences of interest and modifying them according to the experimental specifications. Homologous recombination takes place in plant somatic cells at low frequency. The process can be enhanced to a practical level for genome engineering by introducing double-strand breaks (DSBs) at selected endonuclease target sites. The challenge has been to efficiently make DSBs at genomic sites of interest since there is a bias in the directionality of information transfer between two interacting DNA molecules (the broken one acts as an acceptor of genetic information). Described herein is the use of a guide RNA/Cas system which provides flexible genome cleavage specificity and results in a high frequency of double-strand breaks at a DNA target site, thereby enabling efficient gene editing in a nucleotide sequence of interest, wherein the nucleotide sequence of interest to be edited can be located within or outside the target site recognized and cleaved by a Cas endonuclease.

[0285] A “modified nucleotide” or “edited nucleotide” refers to a nucleotide sequence of interest that comprises at least one alteration when compared to its non-modified nucleotide sequence. Such “alterations” include, for example: (i) replacement of at least one nucleotide, (ii) a deletion of at least one nucleotide, (iii) an insertion of at least one nucleotide, or (iv) any combination of (i)-(iii).

[0286] The term “polynucleotide modification template” includes a polynucleotide that comprises at least one nucleotide modification when compared to the nucleotide sequence to be edited. A nucleotide modification can be at least one nucleotide substitution, addition or deletion. Optionally, the polynucleotide modification template can further comprise homologous nucleotide sequences flanking the at least one nucleotide modification, wherein the flanking homologous nucleotide sequences provide sufficient homology to the desired nucleotide sequence to be edited.

[0287] In one embodiment, the disclosure describes a method for editing a nucleotide sequence in the genome of a cell without incorporating a selectable transgene marker, the method comprising providing at least one guide RNA, at least one polynucleotide modification template, and at least one Cas endonuclease to a cell, wherein the Cas endonuclease is capable of introducing a double-strand break at a target sequence in the genome of said cell, wherein said polynucleotide modification template includes at least one nucleotide modification of said nucleotide sequence to be edited. Cells include, but are not limited to, human, animal, bacterial, fungal, insect, and plant cells as well as plants and seeds produced by the methods described herein. The nucleotide to be edited can be located within or outside a target site recognized and cleaved by a Cas endonuclease. In one embodiment, the at least one nucleotide modification is not a modification at a target site recognized and cleaved by a Cas endonuclease. In another embodiment, there are at least 1, 2, 3, 4, 5, 6, 7, 8, 9, 10, 11, 12, 13, 14, 15, 16, 17, 18, 19, 20, 21, 22, 23, 24, 25, 26, 27, 30, 40, 50, 100, 200, 300, 400, 500, 600, 700, 900 or 1000 nucleotides between the at least one nucleotide to be edited and the genomic target site.

[0288] In one embodiment, the method comprises a method for editing a second gene of a plant genome without introducing an exogenous selectable marker into said plant genome, the method comprising providing a first guide RNA, a first polynucleotide modification template, a second guide RNA, a second polynucleotide modification template, and a Cas endonuclease to a plant cell comprising a first endogenous gene that can be modified to confer herbicide resistance, wherein said first guide RNA and Cas endonuclease are capable of forming a complex that enables the Cas endonuclease to introduce a double strand break at a first target site (located in or near said first endogenous gene) in the genome of said plant cell, wherein said first polynucleotide modification template comprises at least one nucleotide modification of said first endogenous gene to render said endogenous gene capable of conferring herbicide resistance to a plant cell, wherein said second guide RNA and Cas endonuclease are capable of forming a complex that enables the Cas endonuclease to introduce a double strand break at a second target site (located at a different locus than said first endogenous gene) in the genome of said plant cell, wherein said second polynucleotide modification template comprises at least one nucleotide alteration when compared to the second gene to be edited.

[0289] In one embodiment of genome editing, editing of the endogenous enolpyruvylshikimate-3-phosphate synthase (EPSPS) gene is disclosed herein wherein, the polynucleotide modification template (EPSPS polynucleotide modification template) includes a partial fragment of the EPSPS gene (and therefore does not encode a fully functional EPSPS polypeptide by itself). The EPSPS polynucleotide modification template contained three point mutations that were responsible for the creation of the T102I/P106S (TIPS) double mutant (Funke, T et al., J. Biol. Chem. 2009, 284:9854-9860), which provide glyphosate tolerance to transgenic plants expressing as EPSPS double mutant transgene.

[0290] As defined herein “Glyphosate” includes any herbicidally effective form of N-phosphonomethylglycine (including any salt thereof), other forms which result in the production of the glyphosate anion in plants and any other herbicides of the phosphonomethylglycine family.

[0291] Increased resistance to a herbicide is demonstrated when plants which display the increased resistance to a herbicide are subjected to the herbicide and a dose/response curve is shifted to the right when compared with that provided by an appropriate control plant. Such dose/response curves have “dose” plotted on the x-axis and “percentage injury”, “herbicidal effect” etc. plotted on the y-axis. Plants which are substantially resistant to the herbicide exhibit few, if any, bleached, necrotic, lytic, chlorotic or other lesions and are not stunted, wilted or deformed when subjected to the herbicide at concentrations and rates which are typically employed by the agricultural community to kill weeds in the field. The terms resistance and tolerance may be used interchangeably.

[0292] FIG. 12 shows a schematic representation of components used in the genome editing procedure. A maize optimized Cas endonuclease, a guide RNA and a polynucleotide modification template were provided to a plant cell. For example, as shown in FIG. 12, the polynucleotide modification template included three nucleotide modifications (indicated by arrows) when compared to the EPSPS genomic sequence to be edited. These three nucleotide modifications are referred to as TIPS mutations as these nucleotide modifications result in the amino acid changes T-102 to I-102 and P-106 to S-106. The first point mutation results from the substitution of the C nucleotide in the codon sequence ACT with a T nucleotide, a second mutation results from the substitution of the T nucleotide on the same codon sequence ACT with a C nucleotide to form the isoleucine codon ATC, the third point mutation results from the substitution of the first C nucleotide in the codon sequence CCA with a T nucleotide in order to form a serine codon TCA (FIG. 12).

[0293] The nucleotide sequence to be edited can be a sequence that is endogenous, artificial, pre-existing, or transgenic to the cell that is being edited. For example, the nucleotide sequence in the genome of a cell can be a native gene, a mutated gene, a non-native gene, a foreign gene, or a transgene that is stably incorporated into the genome of a cell. Editing of such nucleotide may result in a further desired phenotype or genotype.

### Regulatory Sequence Modifications Using the Guide Polynucleotide/Cas Endonuclease System

[0294] In one embodiment the nucleotide sequence to be modified can be a regulatory sequence such as a promoter wherein the editing of the promoter comprises replacing the promoter (also referred to as a “promoter swap” or “promoter replacement”) or promoter fragment with a different promoter (also referred to as replacement promoter) or promoter fragment (also referred to as replacement promoter fragment), wherein the promoter replacement results in any one of the following or any one combination of the following: an increased promoter activity, an increased promoter tissue specificity, a decreased promoter activity, a decreased promoter tissue specificity, a new promoter activity, an inducible promoter activity, an extended window of gene expression, a modification of the timing or developmental progress of gene expression in the same cell layer or other cell layer (such as but not limiting to extending the timing of gene expression in the tapetum of maize anthers (U.S. Pat. No. 5,837,850 issued Nov. 17, 1998), a mutation of DNA binding elements and/or a deletion or addition of DNA binding elements. The promoter (or promoter fragment) to be modified can be a promoter (or promoter fragment) that is endogenous, artificial, pre-existing, or transgenic to the cell that is being edited. The replacement promoter (or replacement promoter fragment) can be a promoter (or promoter fragment) that is endogenous, artificial, pre-existing, or transgenic to the cell that is being edited.

[0295] In one embodiment the nucleotide sequence can be a promoter wherein the editing of the promoter comprises replacing a native EPSPS1 promoter from with a plant ubiquitin promoter.

[0296] In one embodiment the nucleotide sequence can be a promoter wherein the promoter to be edited is selected from the group comprising Zea mays-PEPC1 promoter (Kausch et al, Plant Molecular Biology, 45: 1-15, 2001), Zea mays Ubiquitin promoter (UBI1ZM PRO, Christensen et al, plant Molecular Biology 18: 675-689, 1992), Zea mays-Rootmet2 promoter (U.S. Pat. No. 7,214,855), Rice actin promoter (OS-ACTIN PRO, U.S. Pat. No. 5,641,876; McElroy et al, The Plant Cell, Vol 2, 163-171, February 1990), Sorghum RCC3 promoter (US 2012/0210463 filed on 13 Feb. 2012), Zea mays-GOS2 promoter (U.S. Pat. No. 6,504,083), Zea mays-ACO2 promoter(U.S. application Ser. No. 14/210,711 filed 14 Mar. 2014) or Zea mays-oleosin promoter (U.S. Pat. No. 8,466,341 B2).

[0297] In one embodiment, the guide polynucleotide/Cas endonuclease system can be used in combination with a co-delivered polynucleotide modification template or donor DNA sequence to allow for the insertion of a promoter or promoter element into a genomic nucleotide sequence of interest without incorporating a selectable transgene marker, wherein the promoter insertion (or promoter element insertion) results in any one of the following or any one combination of the following: an increased promoter activity (increased promoter strength), an increased promoter tissue specificity, a decreased promoter activity, a decreased promoter tissue specificity, a new promoter activity, an inducible promoter activity, an extended window of gene expression, a modification of the timing or developmental progress of gene expression a mutation of DNA binding elements and/or an addition of DNA binding elements. Promoter elements to be inserted can be, but are not limited to, promoter core elements (such as, but not limited to, a CAAT box, a CCAAT box, a Pribnow box, a and/or TATA box, translational regulation sequences and/or a repressor system for inducible expression (such as TET operator repressor/operator/inducer elements, or sulphonylurea (Su) repressor/operator/inducer elements. The dehydration-responsive element (DRE) was first identified as a cis-acting promoter element in the promoter of the drought-responsive gene rd29A, which contains a 9 bp conserved core sequence, TACCGACAT (Yamaguchi-Shinozaki, K., and Shinozaki, K. (1994) Plant Cell 6, 251-264). Insertion of DRE into an endogenous promoter may confer a drought inducible expression of the downstream gene. Another example is ABA-responsive elements (ABREs) which contains a (C/T)ACGTGGC consensus sequence found to be present in numerous ABA and/or stress-regulated genes (Busk P. K., Pages M. (1998) Plant Mol. Biol. 37:425-435). Insertion of 35S enhancer or MMV enhancer into an endogenous promoter region will increase gene expression (U.S. Pat. No. 5,196,525). The promoter (or promoter element) to be inserted can be a promoter (or promoter element) that is endogenous, artificial, pre-existing, or transgenic to the cell that is being edited.

[0298] In one embodiment, the guide polynucleotide/Cas endonuclease system can be used to insert an enhancer element, such as but not limited to a Cauliflower Mosaic Virus 35 S enhancer, in front of an endogenous FMT1 promoter to enhance expression of the FTM1.

[0299] In one embodiment, the guide polynucleotide/Cas endonuclease system can be used to insert a component of the TET operator repressor/operator/inducer system, or a component of the sulphonylurea (Su) repressor/operator/inducer system into plant genomes to generate or control inducible expression systems without incorporating a selectable transgene marker.

[0300] In another embodiment, the guide polynucleotide/Cas endonuclease system can be used to allow for the deletion of a promoter or promoter element, wherein the promoter deletion (or promoter element deletion) results in any one of the following or any one combination of the following: a permanently inactivated gene locus, an increased promoter activity (increased promoter strength), an increased promoter tissue specificity, a decreased promoter activity, a decreased promoter tissue specificity, a new promoter activity, an inducible promoter activity, an extended window of gene expression, a modification of the timing or developmental progress of gene expression, a mutation of DNA binding elements and/or an addition of DNA binding elements. Promoter elements to be deleted can be, but are not limited to, promoter core elements, promoter enhancer elements or 35 S enhancer elements (as described in Example 32) The promoter or promoter fragment to be deleted can be endogenous, artificial, pre-existing, or transgenic to the cell that is being edited.

### Terminator Modifications Using the Guide Polynucleotide/Cas Endonuclease System

[0301] In one embodiment the nucleotide sequence to be modified can be a terminator wherein the editing of the terminator comprises replacing the terminator (also referred to as a “terminator swap” or “terminator replacement”) or terminator fragment with a different terminator (also referred to as replacement terminator) or terminator fragment (also referred to as replacement terminator fragment), wherein the terminator replacement results in any one of the following or any one combination of the following: an increased terminator activity, an increased terminator tissue specificity, a decreased terminator activity, a decreased terminator tissue specificity, a mutation of DNA binding elements and/or a deletion or addition of DNA binding elements.” The terminator (or terminator fragment) to be modified can be a terminator (or terminator fragment) that is endogenous, artificial, pre-existing, or transgenic to the cell that is being edited. The replacement terminator (or replacement terminator fragment) can be a terminator (or terminator fragment) that is endogenous, artificial, pre-existing, or transgenic to the cell that is being edited.

[0302] In one embodiment the nucleotide sequence to be modified can be a terminator wherein the terminator to be edited is selected from the group comprising terminators from maize Argos 8 or SRTF18 genes, or other terminators, such as potato PinII terminator, sorghum actin terminator (SB-ACTIN TERM, WO 2013/184537 A1 published December 2013), sorghum SB-GKAF TERM (WO2013019461), rice T28 terminator (OS-T28 TERM, WO 2013/012729 A2), AT-T9 TERM (WO 2013/012729 A2) or GZ-W64A TERM (U.S. Pat. No. 7,053,282).

[0303] In one embodiment, the guide polynucleotide/Cas endonuclease system can be used in combination with a co-delivered polynucleotide modification template or donor DNA sequence to allow for the insertion of a terminator or terminator element into a genomic nucleotide sequence of interest, wherein the terminator insertion (or terminator element insertion) results in any one of the following or any one combination of the following: an increased terminator activity (increased terminator strength), an increased terminator tissue specificity, a decreased terminator activity, a decreased terminator tissue specificity, a mutation of DNA binding elements and/or an addition of DNA binding elements.

The terminator (or terminator element) to be inserted can be a terminator (or terminator element) that is endogenous, artificial, pre-existing, or transgenic to the cell that is being edited.

[0304] In another embodiment, the guide polynucleotide/Cas endonuclease system can be used to allow for the deletion of a terminator or terminator element, wherein the terminator deletion (or terminator element deletion) results in any one of the following or any one combination of the following: an increased terminator activity (increased terminator strength), an increased terminator tissue specificity, a decreased terminator activity, a decreased terminator tissue specificity, a mutation of DNA binding elements and/or an addition of DNA binding elements. The terminator or terminator fragment to be deleted can be endogenous, artificial, pre-existing, or transgenic to the cell that is being edited.

### Additional Regulatory Sequence Modifications Using the Guide Polynucleotide/Cas Endonuclease System

[0305] In one embodiment, the guide polynucleotide/Cas endonuclease system can be used to modify or replace a regulatory sequence in the genome of a cell without incorporating a selectable transgene marker. A regulatory sequence is a segment of a nucleic acid molecule which is capable of increasing or decreasing the expression of specific genes within an organism and/or is capable of altering tissue specific expression of genes within an organism. Examples of regulatory sequences include, but are not limited to, 3′ UTR (untranslated region) region, 5′ UTR region, transcription activators, transcriptional enhancers transcriptions repressors, translational repressors, splicing factors, miRNAs, siRNA, artificial miRNAs, promoter elements, CAMV 35 S enhancer, MMV enhancer elements (PCT/US14/23451 filed Mar. 11, 2013), SECIS elements, polyadenylation signals, and polyubiquitination sites. In some embodiments the editing (modification) or replacement of a regulatory element results in altered protein translation, RNA cleavage, RNA splicing, transcriptional termination or post translational modification. In one embodiment, regulatory elements can be identified within a promoter and these regulatory elements can be edited or modified do to optimize these regulatory elements for up or down regulation of the promoter.

[0306] In one embodiment, the genomic sequence of interest to be modified is a polyubiquitination site, wherein the modification of the polyubiquitination sites results in a modified rate of protein degradation. The ubiquitin tag condemns proteins to be degraded by proteasomes or autophagy. Proteasome inhibitors are known to cause a protein overproduction. Modifications made to a DNA sequence encoding a protein of interest can result in at least one amino acid modification of the protein of interest, wherein said modification allows for the polyubiquitination of the protein (a post translational modification) resulting in a modification of the protein degradation

[0307] In one embodiment, the genomic sequence of interest to be modified is a polyubiquitination site on a maize EPSPS gene, wherein the polyubiquitination site modified resulting in an increased protein content due to a slower rate of EPSPS protein degradation.

[0308] In one embodiment, the genomic sequence of interest to be modified is a an intron site, wherein the modification consist of inserting an intron enhancing motif into the intron which results in modulation of the transcriptional activity of the gene comprising said intron.

[0309] In one embodiment, the genomic sequence of interest to be modified is a an intron site, wherein the modification consist of replacing a soybean EPSP1 intron with a soybean ubiquitin intron 1 as described herein (Example 25)

[0310] In one embodiment, the genomic sequence of interest to be modified is a an intron or UTR site, wherein the modification consist of inserting at least one microRNA into said intron or UTR site, wherein expression of the gene comprising the intron or UTR site also results in expression of said microRNA, which in turn can silence any gene targeted by the microRNA without disrupting the gene expression of the native/transgene comprising said intron.

[0311] In one embodiment, the guide polynucleotide/Cas endonuclease system can be used to allow for the deletion or mutation of a Zinc Finger transcription factor, wherein the deletion or mutation of the Zinc Finger transcription factor results in or allows for the creation of a dominant negative Zinc Finger transcription factor mutant (Li et al 2013 Rice zinc finger protein DST enhances grain production through controlling Gn1a/OsCKX2 expression PNAS 110:3167-3172). Insertion of a single base pair downstream zinc finger domain will result in a frame shift and produces a new protein which still can bind to DNA without transcription activity. The mutant protein will compete to bind to cytokinin oxidase gene promoters and block the expression of cytokinin oxidase gene. Reduction of cytokinin oxidase gene expression will increase cytokinin level and promote panicle growth in rice and ear growth in maize, and increase yield under normal and stress conditions.

Modifications of Splicing Sites and/or Introducing Alternate Splicing Sites Using the Guide Polynucleotide/Cas Endonuclease System

[0312] Protein synthesis utilizes mRNA molecules that emerge from pre-mRNA molecules subjected to the maturation process. The pre-mRNA molecules are capped, spliced and stabilized by addition of polyA tails. Eukaryotic cells developed a complex process of splicing that result in alternative variants of the original pre-mRNA molecules. Some of them may not produce functional templates for protein synthesis. In maize cells, the splicing process is affected by splicing sites at the exon-intron junction sites. An example of a canonical splice site is AGGT. Gene coding sequences can contains a number of alternate splicing sites that may affect the overall efficiency of the pre-mRNA maturation process and as such may limit the protein accumulation in cells. The guide polynucleotide/Cas endonuclease system can be used in combination with a co-delivered polynucleotide modification template to edit a gene of interest to introduce a canonical splice site at a described junction or any variant of a splicing site that changes the splicing pattern of pre-mRNA molecules, without incorporating a selectable transgene marker.

[0313] In one embodiment, the nucleotide sequence of interest to be modified is a maize EPSPS gene, wherein the modification of the gene consists of modifying alternative splicing sites resulting in enhanced production of the functional gene transcripts and gene products (proteins).

[0314] In one embodiment, the nucleotide sequence of interest to be modified is a gene, wherein the modification of the gene consists of editing the intron borders of alternatively spliced genes to alter the accumulation of splice variants.

### Modifications of Nucleotide Sequences Encoding a Protein of Interest Using the Guide Polynucleotide/Cas Endonuclease System

[0315] In one embodiment, the guide polynucleotide/Cas endonuclease system can be used to modify or replace a coding sequence in the genome of a cell without incorporating a selectable transgene marker, wherein the modification or replacement results in any one of the following, or any one combination of the following: an increased protein (enzyme) activity, an increased protein functionality, a decreased protein activity, a decreased protein functionality, a site specific mutation, a protein domain swap, a protein knock-out, a new protein functionality, a modified protein functionality.

[0316] In one embodiment the protein knockout is due to the introduction of a stop codon into the coding sequence of interest.

[0317] In one embodiment the protein knockout is due to the deletion of a start codon into the coding sequence of interest.

Amino Acid and/or Protein Fusions Using the Guide Polynucleotide/Cas Endonuclease System

[0318] In one embodiment, the guide polynucleotide/Cas endonuclease system can be used with or without a co-delivered polynucleotide sequence to fuse a first coding sequence encoding a first protein to a second coding sequence encoding a second protein in the genome of a cell, without incorporating a selectable transgene marker, wherein the protein fusion results in any one of the following or any one combination of the following: an increased protein (enzyme) activity, an increased protein functionality, a decreased protein activity, a decreased protein functionality, a new protein functionality, a modified protein functionality, a new protein localization, a new timing of protein expression, a modified protein expression pattern, a chimeric protein, or a modified protein with dominant phenotype functionality.

[0319] In one embodiment, the guide polynucleotide/Cas endonuclease system can be used with or without a co-delivered polynucleotide sequence to fuse a first coding sequence encoding a chloroplast localization signal to a second coding sequence encoding a protein of interest, wherein the protein fusion results in targeting the protein of interest to the chloroplast.

[0320] In one embodiment, the guide polynucleotide/Cas endonuclease system can be used with or without a co-delivered polynucleotide sequence to fuse a first coding sequence encoding a chloroplast localization signal to a second coding sequence encoding a protein of interest, wherein the protein fusion results in targeting the protein of interest to the chloroplast.

[0321] In one embodiment, the guide polynucleotide/Cas endonuclease system can be used with or without a co-delivered polynucleotide sequence to fuse a first coding sequence encoding a chloroplast localization signal (e.g., a chloroplast transit peptide) to a second coding sequence, wherein the protein fusion results in a modified protein with dominant phenotype functionality

Gene Silencing by Expressing an Inverted Repeat into a Gene of Interest Using the Guide Polynucleotide/Cas Endonuclease System

[0322] In one embodiment, the guide polynucleotide/Cas endonuclease system can be used in combination with a co-delivered polynucleotide sequence to insert an inverted gene fragment into a gene of interest in the genome of an organism, without incorporating a selectable transgene marker, wherein the insertion of the inverted gene fragment can allow for an in-vivo creation of an inverted repeat (hairpin) and results in the silencing of said endogenous gene.

[0323] In one embodiment the insertion of the inverted gene fragment can result in the formation of an in-vivo created inverted repeat (hairpin) in a native (or modified) promoter of a gene and/or in a native 5′ end of the native gene. The inverted gene fragment can further comprise an intron which can result in an enhanced silencing of the targeted gene.

### Genome Deletion for Trait Locus Characterization

[0324] Trait mapping in plant breeding often results in the detection of chromosomal regions housing one or more genes controlling expression of a trait of interest. For a qualitative trait, the guide polynucleotide/Cas endonuclease system can be used to eliminate candidate genes in the identified chromosomal regions to determine if deletion of the gene affects expression of the trait. For quantitative traits, expression of a trait of interest is governed by multiple quantitative trait loci (QTL) of varying effect-size, complexity, and statistical significance across one or more chromosomes. In cases of negative effect or deleterious QTL regions affecting a complex trait, the guide polynucleotide/Cas endonuclease system can be used to eliminate whole regions delimited by marker-assisted fine mapping, and to target specific regions for their selective elimination or rearrangement. Similarly, presence/absence variation (PAV) or copy number variation (CNV) can be manipulated with selective genome deletion using the guide polynucleotide/Cas endonuclease system.

[0325] In one embodiment, the region of interest can be flanked by two independent guide polynucleotide/CAS endonuclease target sequences. Cutting would be done concurrently. The deletion event would be the repair of the two chromosomal ends without the region of interest. Alternative results would include inversions of the region of interest, mutations at the cut sites and duplication of the region of interest.

[0326] Methods for Identifying at Least One Plant Cell Comprising in its Genome a Polynucleotide of Interest Integrated at the Target Site.

[0327] Further provided are methods for identifying at least one plant cell comprising in its genome a polynucleotide of Interest integrated at the target site. A variety of methods are available for identifying those plant cells with insertion into the genome at or near to the target site without using a screenable marker phenotype. Such methods can be viewed as directly analyzing a target sequence to detect any change in the target sequence, including but not limited to PCR methods, sequencing methods, nuclease digestion, Southern blots, and any combination thereof. See, for example, U.S. patent application Ser. No. 12/147,834, herein incorporated by reference to the extent necessary for the methods described herein. The method also comprises recovering a plant from the plant cell comprising a polynucleotide of Interest integrated into its genome. The plant may be sterile or fertile. It is recognized that any polynucleotide of interest can be provided, integrated into the plant genome at the target site, and expressed in a plant.

[0328] Polynucleotides/polypeptides of interest include, but are not limited to, herbicide-resistance coding sequences, insecticidal coding sequences, nematicidal coding sequences, antimicrobial coding sequences, antifungal coding sequences, antiviral coding sequences, abiotic and biotic stress tolerance coding sequences, or sequences modifying plant traits such as yield, grain quality, nutrient content, starch quality and quantity, nitrogen fixation and/or utilization, fatty acids, and oil content and/or composition. More specific polynucleotides of interest include, but are not limited to, genes that improve crop yield, polypeptides that improve desirability of crops, genes encoding proteins conferring resistance to abiotic stress, such as drought, nitrogen, temperature, salinity, toxic metals or trace elements, or those conferring resistance to toxins such as pesticides and herbicides, or to biotic stress, such as attacks by fungi, viruses, bacteria, insects, and nematodes, and development of diseases associated with these organisms. General categories of genes of interest include, for example, those genes involved in information, such as zinc fingers, those involved in communication, such as kinases, and those involved in housekeeping, such as heat shock proteins. More specific categories of transgenes, for example, include genes encoding important traits for agronomics, insect resistance, disease resistance, herbicide resistance, fertility or sterility, grain characteristics, and commercial products. Genes of interest include, generally, those involved in oil, starch, carbohydrate, or nutrient metabolism as well as those affecting kernel size, sucrose loading, and the like that can be stacked or used in combination with glyphosate resistance described herein.

[0329] The terms “FAD” and fatty acid desaturase are used interchangeably and refer to membrane bound microsomal oleoyl- and linoleoyl-phosphatidylcholine desaturases that convert oleic acid to linoleic acid and linoleic acid to linolenic acid, respectively, in reactions that reduce molecular oxygen to water and require the presence of NADH. The gene for microsomal delta 12 fatty acid desaturases described in WO 94/11516, can be used to make a high oleic acid soybean variety. The resulting high oleic acid soybean variety was one in which the polyunsaturated fatty acids were reduced from 70% of the total fatty acids to less than 5%.

[0330] Plant having a high oleic phenotype (a high oleic acid phenotype) and a herbicide tolerance phenotype conferred by suppression of a FAD2 gene in conjunction with the expression of a sequence that confers tolerance to inhibitors of ALS have been described in U.S. Pat. No. 8,609,935, issued 2013 Dec. 17)

[0331] Two soybean fatty acid desaturases, designated FAD2-1 and FAD2-2, are Δ 12 desaturases that introduce a second double bond into oleic acid to form linoleic acid, a polyunsaturated fatty acid. FAD2-1 is expressed only in the developing seed (Heppard et al. (1996) Plant Physiol. 110:311-319). The expression of this gene increases during the period of oil deposition, starting around 19 days after flowering, and its gene product is responsible for the synthesis of the polyunsaturated fatty acids found in soybean oil. Gm Fad 2-1 is described in detail by Okuley, J. et al. (1994) Plant Cell 6:147 158 and in WO94/11516. It is available from the ATCC in the form of plasmid pSF2 169K (ATCC accession number 69092). FAD 2-2 is expressed in the seed, leaf, root and stem of the soy plant at a constant level and is the “housekeeping” 12-desaturase gene. The Fad 2-2 gene product is responsible for the synthesis of polyunsaturated fatty acids for cell membranes.

Since FAD2-1 is the major enzyme of this type in soybean seeds, reduction in the expression of FAD2-1 results in increased accumulation of oleic acid (18:1) and a corresponding decrease in polyunsaturated fatty acid content. Reduction of expression of FAD2-2 in combination with FAD2-1 leads to a greater accumulation of oleic acid and corresponding decrease in polyunsaturated fatty acid content. FAD3 is a Δ 15 desaturase that introduces a third double bond into linoleic acid (18:2) to form linolenic acid (18:3). Reduction of expression of FAD3 in combination with reduction of FAD2-1 and FAD2-2 leads to a greater accumulation of oleic acid and corresponding decrease in polyunsaturated fatty acid content, especially linolenic acid.

[0332] Nucleic acid fragments encoding FAD2-1, FAD2-2, and FAD3 have been described in WO 94/11516 and WO 93/11245. Chimeric recombinant constructs comprising all or a part of these nucleic acid fragments or the reverse complements thereof operably linked to at least one suitable regulatory sequence can be constructed wherein expression of the chimeric gene results in an altered fatty acid phenotype. A chimeric recombinant construct can be introduced into soybean plants via transformation techniques well known to those skilled in the art. Transgenic soybean plants resulting from a transformation with a recombinant DNA are assayed to select plants with altered fatty acid profiles. The recombinant construct may contain all or part of 1) the FAD2-1 gene or 2) the FAD2-2 gene or 3) the FAD3 gene or 4) combinations of all or portions of the FAD2-1, Fad2-2, or FAD3 genes.

[0333] Recombinant constructs comprising all or part of 1) the FAD2-1 gene with or without 2) all or part of the Fad2-2 gene with or without all or part of the FAD3 gene can be used in making a transgenic soybean plant having a high oleic phenotype. An altered fatty acid profile, specifically an increase in the proportion of oleic acid and a decrease in the proportion of the polyunsaturated fatty acids, indicates that one or more of the soybean seed FAD genes (FAD2-1, Fad2-2, FAD3) have been suppressed. Assays may be conducted on soybean somatic embryo cultures and seeds to determine suppression of FAD2-1, Fad2-2, or FAD3.

[0334] Agronomically important traits such as oil, starch, and protein content can be genetically altered in addition to using traditional breeding methods. Modifications include increasing content of oleic acid, saturated and unsaturated oils, increasing levels of lysine and sulfur, providing essential amino acids, and also modification of starch. Hordothionin protein modifications are described in U.S. Pat. Nos. 5,703,049, 5,885,801, 5,885,802, and 5,990,389, herein incorporated by reference. Another example is lysine and/or sulfur rich seed protein encoded by the soybean 2S albumin described in U.S. Pat. No. 5,850,016, and the chymotrypsin inhibitor from barley, described in Williamson et al. (1987) Eur. J. Biochem. 165:99-106, the disclosures of which are herein incorporated by reference.

[0335] Commercial traits can also be encoded on a polynucleotide of interest that could increase for example, starch for ethanol production, or provide expression of proteins. Another important commercial use of transformed plants is the production of polymers and bioplastics such as described in U.S. Pat. No. 5,602,321. Genes such as β-Ketothiolase, PHBase (polyhydroxybutyrate synthase), and acetoacetyl-CoA reductase (see Schubert et al. (1988) J. Bacteriol. 170:5837-5847) facilitate expression of polyhydroxyalkanoates (PHAs).

[0336] Derivatives of the coding sequences can be made by site-directed mutagenesis to increase the level of preselected amino acids in the encoded polypeptide. For example, the gene encoding the barley high lysine polypeptide (BHL) is derived from barley chymotrypsin inhibitor, U.S. application Ser. No. 08/740,682, filed Nov. 1, 1996, and WO 98/20133, the disclosures of which are herein incorporated by reference. Other proteins include methionine-rich plant proteins such as from sunflower seed (Lilley et al. (1989) Proceedings of the World Congress on Vegetable Protein Utilization in Human Foods and Animal Feedstuffs, ed. Applewhite (American Oil Chemists Society, Champaign, Ill.), pp. 497-502; herein incorporated by reference); corn (Pedersen et al. (1986) J. Biol. Chem. 261:6279; Kirihara et al. (1988) Gene 71:359; both of which are herein incorporated by reference); and rice (Musumura et al. (1989) Plant Mol. Biol. 12:123, herein incorporated by reference). Other agronomically important genes encode latex, Floury 2, growth factors, seed storage factors, and transcription factors.

[0337] Polynucleotides that improve crop yield include dwarfing genes, such as Rht1 and Rht2 (Peng et al. (1999) Nature 400:256-261), and those that increase plant growth, such as ammonium-inducible glutamate dehydrogenase. Polynucleotides that improve desirability of crops include, for example, those that allow plants to have reduced saturated fat content, those that boost the nutritional value of plants, and those that increase grain protein. Polynucleotides that improve salt tolerance are those that increase or allow plant growth in an environment of higher salinity than the native environment of the plant into which the salt-tolerant gene(s) has been introduced.

[0338] Polynucleotides/polypeptides that influence amino acid biosynthesis include, for example, anthranilate synthase (AS; EC 4.1.3.27) which catalyzes the first reaction branching from the aromatic amino acid pathway to the biosynthesis of tryptophan in plants, fungi, and bacteria. In plants, the chemical processes for the biosynthesis of tryptophan are compartmentalized in the chloroplast. See, for example, US Pub. 20080050506, herein incorporated by reference. Additional sequences of interest include Chorismate Pyruvate Lyase (CPL) which includes a gene encoding an enzyme which catalyzes the conversion of chorismate to pyruvate and pHBA. The most well characterized CPL gene has been isolated from E. coli and bears the GenBank accession number M96268. See, U.S. Pat. No. 7,361,811, herein incorporated by reference.

[0339] Polynucleotide sequences of interest may encode proteins involved in providing disease or pest resistance. By “disease resistance” or “pest resistance” is intended that the plants avoid the harmful symptoms that are the outcome of the plant-pathogen interactions. Pest resistance genes may encode resistance to pests that have great yield drag such as rootworm, cutworm, European Corn Borer, and the like. Disease resistance and insect resistance genes such as lysozymes or cecropins for antibacterial protection, or proteins such as defensins, glucanases or chitinases for antifungal protection, or Bacillus thuringiensis endotoxins, protease inhibitors, collagenases, lectins, or glycosidases for controlling nematodes or insects are all examples of useful gene products. Genes encoding disease resistance traits include detoxification genes, such as against fumonisin (U.S. Pat. No. 5,792,931); avirulence (avr) and disease resistance (R) genes (Jones et al. (1994) Science 266:789; Martin et al. (1993) Science 262:1432; and Mindrinos et al. (1994) Cell 78:1089); and the like. Insect resistance genes may encode resistance to pests that have great yield drag such as rootworm, cutworm, European Corn Borer, and the like. Such genes include, for example, Bacillus thuringiensis toxic protein genes (U.S. Pat. Nos. 5,366,892; 5,747,450; 5,736,514; 5,723,756; 5,593,881; and Geiser et al. (1986) Gene 48:109); and the like.

[0340] An “herbicide resistance protein” or a protein resulting from expression of an “herbicide resistance-encoding nucleic acid molecule” includes proteins that confer upon a cell the ability to tolerate a higher concentration of an herbicide than cells that do not express the protein, or to tolerate a certain concentration of an herbicide for a longer period of time than cells that do not express the protein. Herbicide resistance traits may be introduced into plants by genes coding for resistance to herbicides that act to inhibit the action of acetolactate synthase (ALS), in particular the sulfonylurea-type herbicides, genes coding for resistance to herbicides that act to inhibit the action of glutamine synthase, such as phosphinothricin or basta (e.g., the bar gene), glyphosate (e.g., the EPSP synthase gene and the GAT gene), HPPD inhibitors (e.g, the HPPD gene) or other such genes known in the art. See, for example, U.S. Pat. Nos. 7,626,077, 5,310,667, 5,866,775, 6,225,114, 6,248,876, 7,169,970, 6,867,293, and U.S. Provisional Application No. 61/401,456, each of which is herein incorporated by reference. The bar gene encodes resistance to the herbicide basta, the nptII gene encodes resistance to the antibiotics kanamycin and geneticin, and the ALS-gene mutants encode resistance to the herbicide chlorsulfuron.

[0341] Sterility genes can also be encoded in an expression cassette and provide an alternative to physical detasseling. Examples of genes used in such ways include male fertility genes such as MS26 (see for example U.S. Pat. Nos. 7,098,388, 7,517,975, 7,612,251), MS45 (see for example U.S. Pat. Nos. 5,478,369, 6,265,640) or MSCA1 (see for example U.S. Pat. No. 7,919,676). Maize plants (Zea mays L.) can be bred by both self-pollination and cross-pollination techniques. Maize has male flowers, located on the tassel, and female flowers, located on the ear, on the same plant. It can self-pollinate (“selfing”) or cross pollinate. Natural pollination occurs in maize when wind blows pollen from the tassels to the silks that protrude from the tops of the incipient ears. Pollination may be readily controlled by techniques known to those of skill in the art. The development of maize hybrids requires the development of homozygous inbred lines, the crossing of these lines, and the evaluation of the crosses. Pedigree breeding and recurrent selections are two of the breeding methods used to develop inbred lines from populations. Breeding programs combine desirable traits from two or more inbred lines or various broad-based sources into breeding pools from which new inbred lines are developed by selfing and selection of desired phenotypes. A hybrid maize variety is the cross of two such inbred lines, each of which may have one or more desirable characteristics lacked by the other or which complement the other. The new inbreds are crossed with other inbred lines and the hybrids from these crosses are evaluated to determine which have commercial potential. The hybrid progeny of the first generation is designated F1. The F1 hybrid is more vigorous than its inbred parents. This hybrid vigor, or heterosis, can be manifested in many ways, including increased vegetative growth and increased yield.

[0342] Hybrid maize seed can be produced by a male sterility system incorporating manual detasseling. To produce hybrid seed, the male tassel is removed from the growing female inbred parent, which can be planted in various alternating row patterns with the male inbred parent. Consequently, providing that there is sufficient isolation from sources of foreign maize pollen, the ears of the female inbred will be fertilized only with pollen from the male inbred. The resulting seed is therefore hybrid (F1) and will form hybrid plants.

[0343] Field variation impacting plant development can result in plants tasseling after manual detasseling of the female parent is completed. Or, a female inbred plant tassel may not be completely removed during the detasseling process. In any event, the result is that the female plant will successfully shed pollen and some female plants will be self-pollinated. This will result in seed of the female inbred being harvested along with the hybrid seed which is normally produced. Female inbred seed does not exhibit heterosis and therefore is not as productive as F1 seed. In addition, the presence of female inbred seed can represent a germplasm security risk for the company producing the hybrid.

[0344] Alternatively, the female inbred can be mechanically detasseled by machine. Mechanical detasseling is approximately as reliable as hand detasseling, but is faster and less costly. However, most detasseling machines produce more damage to the plants than hand detasseling. Thus, no form of detasseling is presently entirely satisfactory, and a need continues to exist for alternatives which further reduce production costs and to eliminate self-pollination of the female parent in the production of hybrid seed.

[0345] Mutations that cause male sterility in plants have the potential to be useful in methods for hybrid seed production for crop plants such as maize and can lower production costs by eliminating the need for the labor-intensive removal of male flowers (also known as de-tasseling) from the maternal parent plants used as a hybrid parent. Mutations that cause male sterility in maize have been produced by a variety of methods such as X-rays or UV-irradiations, chemical treatments, or transposable element insertions (ms23, ms25, ms26, ms32) (Chaubal et al. (2000) Am J Bot 87:1193-1201). Conditional regulation of fertility genes through fertility/sterility “molecular switches” could enhance the options for designing new male-sterility systems for crop improvement (Unger et al. (2002) Transgenic Res 11:455-465).

[0346] Besides identification of novel genes impacting male fertility, there remains a need to provide a reliable system of producing genetic male sterility.

[0347] In U.S. Pat. No. 5,478,369, a method is described by which the Ms45 male fertility gene was tagged and cloned on maize chromosome 9. Previously, there had been described a male fertility gene on chromosome 9, ms2, which had never been cloned and sequenced. It is not allelic to the gene referred to in the '369 patent. See Albertsen, M. and Phillips, R. L., “Developmental Cytology of 13 Genetic Male Sterile Loci in Maize” Canadian Journal of Genetics & Cytology 23:195-208 (January 1981). The only fertility gene cloned before that had been the Arabidopsis gene described at Aarts, et al., supra.

[0348] Examples of genes that have been discovered subsequently that are important to male fertility are numerous and include the Arabidopsis ABORTED MICROSPORES (AMS) gene, Sorensen et al., The Plant Journal (2003) 33(2):413-423); the Arabidopsis MS1 gene (Wilson et al., The Plant Journal (2001) 39(2):170-181); the NEF1 gene (Ariizumi et al., The Plant Journal (2004) 39(2):170-181); Arabidopsis AtGPAT1 gene (Zheng et al., The Plant Cell (2003) 15:1872-1887); the Arabidopsis dde2-2 mutation was shown to be defective in the allene oxide syntase gene (Malek et al., Planta (2002)216:187-192); the Arabidopsis faceless pollen-1 gene (flp1) (Ariizumi et al, Plant Mol. Biol. (2003) 53:107-116); the Arabidopsis MALE MEIOCYTE DEATH1 gene (Yang et al., The Plant Cell (2003) 15: 1281-1295); the tapetum-specific zinc finger gene, TAZ1 (Kapoor et al., The Plant Cell (2002) 14:2353-2367); and the TAPETUM DETERMINANT1 gene (Lan et al, The Plant Cell (2003) 15:2792-2804).

[0349] Other known male fertility mutants or genes from Zea mays are listed in U.S. Pat. No. 7,919,676 incorporated herein by reference.

[0350] Other genes include kinases and those encoding compounds toxic to either male or female gametophytic development.

[0351] Furthermore, it is recognized that the polynucleotide of interest may also comprise antisense sequences complementary to at least a portion of the messenger RNA (mRNA) for a targeted gene sequence of interest. Antisense nucleotides are constructed to hybridize with the corresponding mRNA. Modifications of the antisense sequences may be made as long as the sequences hybridize to and interfere with expression of the corresponding mRNA. In this manner, antisense constructions having 70%, 80%, or 85% sequence identity to the corresponding antisense sequences may be used. Furthermore, portions of the antisense nucleotides may be used to disrupt the expression of the target gene. Generally, sequences of at least 50 nucleotides, 100 nucleotides, 200 nucleotides, or greater may be used.

[0352] In addition, the polynucleotide of interest may also be used in the sense orientation to suppress the expression of endogenous genes in plants. Methods for suppressing gene expression in plants using polynucleotides in the sense orientation are known in the art. The methods generally involve transforming plants with a DNA construct comprising a promoter that drives expression in a plant operably linked to at least a portion of a nucleotide sequence that corresponds to the transcript of the endogenous gene. Typically, such a nucleotide sequence has substantial sequence identity to the sequence of the transcript of the endogenous gene, generally greater than about 65% sequence identity, about 85% sequence identity, or greater than about 95% sequence identity. See, U.S. Pat. Nos. 5,283,184 and 5,034,323; herein incorporated by reference.

[0353] The polynucleotide of interest can also be a phenotypic marker. A phenotypic marker is screenable or a selectable marker that includes visual markers and selectable markers whether it is a positive or negative selectable marker. Any phenotypic marker can be used. Specifically, a selectable or screenable marker comprises a DNA segment that allows one to identify, or select for or against a molecule or a cell that contains it, often under particular conditions. These markers can encode an activity, such as, but not limited to, production of RNA, peptide, or protein, or can provide a binding site for RNA, peptides, proteins, inorganic and organic compounds or compositions and the like.

[0354] Examples of selectable markers include, but are not limited to, DNA segments that comprise restriction enzyme sites; DNA segments that encode products which provide resistance against otherwise toxic compounds including antibiotics, such as, spectinomycin, ampicillin, kanamycin, tetracycline, Basta, neomycin phosphotransferase II (NEO) and hygromycin phosphotransferase (HPT)); DNA segments that encode products which are otherwise lacking in the recipient cell (e.g., tRNA genes, auxotrophic markers); DNA segments that encode products which can be readily identified (e.g., phenotypic markers such as β-galactosidase, GUS; fluorescent proteins such as green fluorescent protein (GFP), cyan (CFP), yellow (YFP), red (RFP), and cell surface proteins); the generation of new primer sites for PCR (e.g., the juxtaposition of two DNA sequence not previously juxtaposed), the inclusion of DNA sequences not acted upon or acted upon by a restriction endonuclease or other DNA modifying enzyme, chemical, etc.; and, the inclusion of a DNA sequences required for a specific modification (e.g., methylation) that allows its identification.

[0355] Additional selectable markers include genes that confer resistance to herbicidal compounds, such as glufosinate ammonium, bromoxynil, imidazolinones, and 2,4-dichlorophenoxyacetate (2,4-D). See for example, Yarranton, (1992) Curr Opin Biotech 3:506-11; Christopherson et al., (1992) Proc. Natl. Acad. Sci. USA 89:6314-8; Yao et al., (1992) Cell 71:63-72; Reznikoff, (1992) Mol Microbiol 6:2419-22; Hu et al., (1987) Cell 48:555-66; Brown et al., (1987) Cell 49:603-12; Figge et al., (1988) Cell 52:713-22; Deuschle et al., (1989) Proc. Natl. Acad. Sci. USA 86:5400-4; Fuerst et al., (1989) Proc. Natl. Acad. Sci. USA 86:2549-53; Deuschle et al., (1990) Science 248:480-3; Gossen, (1993) Ph.D. Thesis, University of Heidelberg; Reines et al., (1993) Proc. Natl. Acad. Sci. USA 90:1917-21; Labow et al., (1990) Mol Cell Biol 10:3343-56; Zambretti et al., (1992) Proc. Natl. Acad. Sci. USA 89:3952-6; Bairn et al., (1991) Proc. Natl. Acad. Sci. USA 88:5072-6; Wyborski et al., (1991) Nucleic Acids Res 19:4647-53; Hillen and Wissman, (1989) Topics Mol Struc Biol 10:143-62; Degenkolb et al., (1991) Antimicrob Agents Chemother 35:1591-5; Kleinschnidt et al., (1988) Biochemistry 27:1094-104; Bonin, (1993) Ph.D. Thesis, University of Heidelberg; Gossen et al., (1992) Proc. Natl. Acad. Sci. USA 89:5547-51; Oliva et al., (1992) Antimicrob Agents Chemother 36:913-9; Hlavka et al., (1985) Handbook of Experimental Pharmacology, Vol. 78 (Springer-Verlag, Berlin); Gill et al., (1988) Nature 334:721-4. Commercial traits can also be encoded on a gene or genes that could increase for example, starch for ethanol production, or provide expression of proteins. Another important commercial use of transformed plants is the production of polymers and bioplastics such as described in U.S. Pat. No. 5,602,321. Genes such as β-Ketothiolase, PHBase (polyhydroxyburyrate synthase), and acetoacetyl-CoA reductase (see Schubert et al. (1988) J. Bacteriol. 170:5837-5847) facilitate expression of polyhyroxyalkanoates (PHAs).

[0356] Exogenous products include plant enzymes and products as well as those from other sources including prokaryotes and other eukaryotes. Such products include enzymes, cofactors, hormones, and the like. The level of proteins, particularly modified proteins having improved amino acid distribution to improve the nutrient value of the plant, can be increased. This is achieved by the expression of such proteins having enhanced amino acid content.

[0357] The transgenes, recombinant DNA molecules, DNA sequences of interest, and polynucleotides of interest can be comprise one or more DNA sequences for gene silencing. Methods for gene silencing involving the expression of DNA sequences in plant are known in the art include, but are not limited to, cosuppression, antisense suppression, double-stranded RNA (dsRNA) interference, hairpin RNA (hpRNA) interference, intron-containing hairpin RNA (ihpRNA) interference, transcriptional gene silencing, and micro RNA (miRNA) interference

[0358] As used herein, “nucleic acid” means a polynucleotide and includes a single or a double-stranded polymer of deoxyribonucleotide or ribonucleotide bases. Nucleic acids may also include fragments and modified nucleotides. Thus, the terms “polynucleotide”, “nucleic acid sequence”, “nucleotide sequence” and “nucleic acid fragment” are used interchangeably to denote a polymer of RNA and/or DNA that is single- or double-stranded, optionally containing synthetic, non-natural, or altered nucleotide bases. Nucleotides (usually found in their 5′-monophosphate form) are referred to by their single letter designation as follows: “A” for adenosine or deoxyadenosine (for RNA or DNA, respectively), “C” for cytosine or deoxycytosine, “G” for guanosine or deoxyguanosine, “U” for uridine, “T” for deoxythymidine, “R” for purines (A or G), “Y” for pyrimidines (C or T), “K” for G or T, “H” for A or C or T, “I” for inosine, and “N” for any nucleotide.

[0359] “Open reading frame” is abbreviated ORF.

[0360] The terms “subfragment that is functionally equivalent” and “functionally equivalent subfragment” are used interchangeably herein. These terms refer to a portion or subsequence of an isolated nucleic acid fragment in which the ability to alter gene expression or produce a certain phenotype is retained whether or not the fragment or subfragment encodes an active enzyme. For example, the fragment or subfragment can be used in the design of genes to produce the desired phenotype in a transformed plant. genes can be designed for use in suppression by linking a nucleic acid fragment or subfragment thereof, whether or not it encodes an active enzyme, in the sense or antisense orientation relative to a plant promoter sequence.

[0361] The term “conserved domain” or “motif” means a set of amino acids conserved at specific positions along an aligned sequence of evolutionarily related proteins. While amino acids at other positions can vary between homologous proteins, amino acids that are highly conserved at specific positions indicate amino acids that are essential to the structure, the stability, or the activity of a protein. Because they are identified by their high degree of conservation in aligned sequences of a family of protein homologues, they can be used as identifiers, or “signatures”, to determine if a protein with a newly determined sequence belongs to a previously identified protein family.

[0362] Polynucleotide and polypeptide sequences, variants thereof, and the structural relationships of these sequences can be described by the terms “homology”, “homologous”, “substantially identical”, “substantially similar” and “corresponding substantially” which are used interchangeably herein. These refer to polypeptide or nucleic acid fragments wherein changes in one or more amino acids or nucleotide bases do not affect the function of the molecule, such as the ability to mediate gene expression or to produce a certain phenotype. These terms also refer to modification(s) of nucleic acid fragments that do not substantially alter the functional properties of the resulting nucleic acid fragment relative to the initial, unmodified fragment. These modifications include deletion, substitution, and/or insertion of one or more nucleotides in the nucleic acid fragment.

[0363] Substantially similar nucleic acid sequences encompassed may be defined by their ability to hybridize (under moderately stringent conditions, e.g., 0.5×SSC, 0.1% SDS, 60° C.) with the sequences exemplified herein, or to any portion of the nucleotide sequences disclosed herein and which are functionally equivalent to any of the nucleic acid sequences disclosed herein. Stringency conditions can be adjusted to screen for moderately similar fragments, such as homologous sequences from distantly related organisms, to highly similar fragments, such as genes that duplicate functional enzymes from closely related organisms. Post-hybridization washes determine stringency conditions.

[0364] The term “selectively hybridizes” includes reference to hybridization, under stringent hybridization conditions, of a nucleic acid sequence to a specified nucleic acid target sequence to a detectably greater degree (e.g., at least 2-fold over background) than its hybridization to non-target nucleic acid sequences and to the substantial exclusion of non-target nucleic acids. Selectively hybridizing sequences typically have about at least 80% sequence identity, or 90% sequence identity, up to and including 100% sequence identity (i.e., fully complementary) with each other.

[0365] The term “stringent conditions” or “stringent hybridization conditions” includes reference to conditions under which a probe will selectively hybridize to its target sequence in an in vitro hybridization assay. Stringent conditions are sequence-dependent and will be different in different circumstances. By controlling the stringency of the hybridization and/or washing conditions, target sequences can be identified which are 100% complementary to the probe (homologous probing). Alternatively, stringency conditions can be adjusted to allow some mismatching in sequences so that lower degrees of similarity are detected (heterologous probing). Generally, a probe is less than about 1000 nucleotides in length, optionally less than 500 nucleotides in length.

[0366] Typically, stringent conditions will be those in which the salt concentration is less than about 1.5 M Na ion, typically about 0.01 to 1.0 M Na ion concentration (or other salt(s)) at pH 7.0 to 8.3, and at least about 30° C. for short probes (e.g., 10 to 50 nucleotides) and at least about 60° C. for long probes (e.g., greater than 50 nucleotides). Stringent conditions may also be achieved with the addition of destabilizing agents such as formamide. Exemplary low stringency conditions include hybridization with a buffer solution of 30 to 35% formamide, 1 M NaCl, 1% SDS (sodium dodecyl sulphate) at 37° C., and a wash in 1× to 2×SSC (20×SSC=3.0 M NaCl/0.3 M trisodium citrate) at 50 to 55° C. Exemplary moderate stringency conditions include hybridization in 40 to 45% formamide, 1 M NaCl, 1% SDS at 37° C., and a wash in 0.5× to 1×SSC at 55 to 60° C. Exemplary high stringency conditions include hybridization in 50% formamide, 1 M NaCl, 1% SDS at 37° C., and a wash in 0.1×SSC at 60 to 65° C.

[0367] “Sequence identity” or “identity” in the context of nucleic acid or polypeptide sequences includes the nucleic acid bases or amino acid residues in two sequences that are the same when aligned for maximum correspondence over a specified comparison window.

[0368] The term “percentage of sequence identity” refers to the value determined by comparing two optimally aligned sequences over a comparison window, wherein the portion of the polynucleotide or polypeptide sequence in the comparison window may comprise additions or deletions (i.e., gaps) as compared to the reference sequence (which does not comprise additions or deletions) for optimal alignment of the two sequences. The percentage is calculated by determining the number of positions at which the identical nucleic acid base or amino acid residue occurs in both sequences to yield the number of matched positions, dividing the number of matched positions by the total number of positions in the window of comparison and multiplying the results by 100 to yield the percentage of sequence identity. Useful examples of percent sequence identities include, but are not limited to, 50%, 55%, 60%, 65%, 70%, 75%, 80%, 85%, 90% or 95%, or any integer percentage from 50% to 100%. These identities can be determined using any of the programs described herein.

[0369] Sequence alignments and percent identity or similarity calculations may be determined using a variety of comparison methods designed to detect homologous sequences including, but not limited to, the MegAlign™ program of the LASERGENE bioinformatics computing suite (DNASTAR Inc., Madison, Wis.). Within the context of this application it will be understood that where sequence analysis software is used for analysis, that the results of the analysis will be based on the “default values” of the program referenced, unless otherwise specified. As used herein “default values” will mean any set of values or parameters that originally load with the software when first initialized.

[0370] The “Clustal V method of alignment” corresponds to the alignment method labeled Clustal V (described by Higgins and Sharp, (1989) CABIOS 5:151-153; Higgins et al., (1992) Comput Appl Biosci 8:189-191) and found in the MegAlign™ program of the LASERGENE bioinformatics computing suite (DNASTAR Inc., Madison, Wis.). For multiple alignments, the default values correspond to GAP PENALTY=10 and GAP LENGTH PENALTY=10. Default parameters for pairwise alignments and calculation of percent identity of protein sequences using the Clustal method are KTUPLE=1, GAP PENALTY=3, WINDOW=5 and DIAGONALS SAVED=5. For nucleic acids these parameters are KTUPLE=2, GAP PENALTY=5, WINDOW=4 and DIAGONALS SAVED=4. After alignment of the sequences using the Clustal V program, it is possible to obtain a “percent identity” by viewing the “sequence distances” table in the same program.

[0371] The “Clustal W method of alignment” corresponds to the alignment method labeled Clustal W (described by Higgins and Sharp, (1989) CABIOS 5:151-153; Higgins et al., (1992) Comput Appl Biosci 8:189-191) and found in the MegAlign™ v6.1 program of the LASERGENE bioinformatics computing suite (DNASTAR Inc., Madison, Wis.). Default parameters for multiple alignment (GAP PENALTY=10, GAP LENGTH PENALTY=0.2, Delay Divergen Seqs (%)=30, DNA Transition Weight=0.5, Protein Weight Matrix=Gonnet Series, DNA Weight Matrix=IUB). After alignment of the sequences using the Clustal W program, it is possible to obtain a “percent identity” by viewing the “sequence distances” table in the same program.

[0372] Unless otherwise stated, sequence identity/similarity values provided herein refer to the value obtained using GAP Version 10 (GCG, Accelrys, San Diego, Calif.) using the following parameters: % identity and % similarity for a nucleotide sequence using a gap creation penalty weight of 50 and a gap length extension penalty weight of 3, and the nwsgapdna.cmp scoring matrix; % identity and % similarity for an amino acid sequence using a GAP creation penalty weight of 8 and a gap length extension penalty of 2, and the BLOSUM62 scoring matrix (Henikoff and Henikoff, (1989) Proc. Natl. Acad. Sci. USA 89:10915). GAP uses the algorithm of Needleman and Wunsch, (1970) J Mol Biol 48:443-53, to find an alignment of two complete sequences that maximizes the number of matches and minimizes the number of gaps. GAP considers all possible alignments and gap positions and creates the alignment with the largest number of matched bases and the fewest gaps, using a gap creation penalty and a gap extension penalty in units of matched bases.

[0373] “BLAST” is a searching algorithm provided by the National Center for Biotechnology Information (NCBI) used to find regions of similarity between biological sequences. The program compares nucleotide or protein sequences to sequence databases and calculates the statistical significance of matches to identify sequences having sufficient similarity to a query sequence such that the similarity would not be predicted to have occurred randomly. BLAST reports the identified sequences and their local alignment to the query sequence.

[0374] It is well understood by one skilled in the art that many levels of sequence identity are useful in identifying polypeptides from other species or modified naturally or synthetically wherein such polypeptides have the same or similar function or activity. Useful examples of percent identities include, but are not limited to, 50%, 55%, 60%, 65%, 70%, 75%, 80%, 85%, 90% or 95%, or any integer percentage from 50% to 100%. Indeed, any integer amino acid identity from 50% to 100% may be useful in describing the present disclosure, such as 51%, 52%, 53%, 54%, 55%, 56%, 58%, 59%, 60%, 61%, 62%, 63%, 64%, 65%, 66%, 67%, 68%, 69%, 70%, 71%, 72%, 73%, 74%, 75%, 76%, 77%, 78%, 79%, 80%, 81%, 82%, 83%, 84%, 85%, 86%, 87%, 88%, 89%, 90%, 91%, 92%, 93%, 94%, 95%, 96%, 97%, 98% or 99%.

[0375] “Gene” includes a nucleic acid fragment that expresses a functional molecule such as, but not limited to, a specific protein, including regulatory sequences preceding (5′ non-coding sequences) and following (3′ non-coding sequences) the coding sequence. “Native gene” refers to a gene as found in nature with its own regulatory sequences.

[0376] A “mutated gene” is a gene that has been altered through human intervention. Such a “mutated gene” has a sequence that differs from the sequence of the corresponding non-mutated gene by at least one nucleotide addition, deletion, or substitution. In certain embodiments of the disclosure, the mutated gene comprises an alteration that results from a guide polynucleotide/Cas endonuclease system as disclosed herein. A mutated plant is a plant comprising a mutated gene.

[0377] Targeted mutation includes a mutation in a native gene that was made by altering a target sequence within the native gene using a method involving a double-strand-break-inducing agent that is capable of inducing a double-strand break in the DNA of the target sequence as disclosed herein or known in the art.

[0378] In one embodiment, the targeted mutation is the result of a guideRNA/Cas endonuclease induced gene editing, without incorporating a selectable transgene marker, as described herein. The guide RNA/Cas endonuclease induced targeted mutation can occur in a nucleotide sequence that is located within or outside a genomic target site that is recognized and cleaved by a Cas endonuclease.

[0379] The term “genome” as it applies to a plant cells encompasses not only chromosomal DNA found within the nucleus, but organelle DNA found within subcellular components (e.g., mitochondria, or plastid) of the cell.

[0380] A “codon-modified gene” or “codon-preferred gene” or “codon-optimized gene” is a gene having its frequency of codon usage designed to mimic the frequency of preferred codon usage of the host cell.

[0381] An “allele” is one of several alternative forms of a gene occupying a given locus on a chromosome. When all the alleles present at a given locus on a chromosome are the same, that plant is homozygous at that locus. If the alleles present at a given locus on a chromosome differ, that plant is heterozygous at that locus.

[0382] “Coding sequence” refers to a polynucleotide sequence which codes for a specific amino acid sequence. “Regulatory sequences” refer to nucleotide sequences located upstream (5′ non-coding sequences), within, or downstream (3′ non-coding sequences) of a coding sequence, and which influence the transcription, RNA processing or stability, or translation of the associated coding sequence. Regulatory sequences may include, but are not limited to: promoters, translation leader sequences, 5′ untranslated sequences, 3′ untranslated sequences, introns, polyadenylation target sequences, RNA processing sites, effector binding sites, and stem-loop structures.

[0383] “A plant-optimized nucleotide sequence” is nucleotide sequence that has been optimized for increased expression in plants, particularly for increased expression in plants or in one or more plants of interest. For example, a plant-optimized nucleotide sequence can be synthesized by modifying a nucleotide sequence encoding a protein such as, for example, double-strand-break-inducing agent (e.g., an endonuclease) as disclosed herein, using one or more plant-preferred codons for improved expression. See, for example, Campbell and Gowri (1990) Plant Physiol. 92:1-11 for a discussion of host-preferred codon usage.

[0384] Methods are available in the art for synthesizing plant-preferred genes. See, for example, U.S. Pat. Nos. 5,380,831, and 5,436,391, and Murray et al. (1989) Nucleic Acids Res. 17:477-498, herein incorporated by reference. Additional sequence modifications are known to enhance gene expression in a plant host. These include, for example, elimination of: one or more sequences encoding spurious polyadenylation signals, one or more exon-intron splice site signals, one or more transposon-like repeats, and other such well-characterized sequences that may be deleterious to gene expression. The G-C content of the sequence may be adjusted to levels average for a given plant host, as calculated by reference to known genes expressed in the host plant cell. When possible, the sequence is modified to avoid one or more predicted hairpin secondary mRNA structures. Thus, “a plant-optimized nucleotide sequence” of the present disclosure comprises one or more of such sequence modifications.

[0385] “Promoter” refers to a DNA sequence capable of controlling the expression of a coding sequence or functional RNA. The promoter sequence consists of proximal and more distal upstream elements, the latter elements often referred to as enhancers. An “enhancer” is a DNA sequence that can stimulate promoter activity, and may be an innate element of the promoter or a heterologous element inserted to enhance the level or tissue-specificity of a promoter. Promoters may be derived in their entirety from a native gene, or be composed of different elements derived from different promoters found in nature, and/or comprise synthetic DNA segments. It is understood by those skilled in the art that different promoters may direct the expression of a gene in different tissues or cell types, or at different stages of development, or in response to different environmental conditions. It is further recognized that since in most cases the exact boundaries of regulatory sequences have not been completely defined, DNA fragments of some variation may have identical promoter activity. Promoters that cause a gene to be expressed in most cell types at most times are commonly referred to as “constitutive promoters”.

[0386] It has been shown that certain promoters are able to direct RNA synthesis at a higher rate than others. These are called “strong promoters”. Certain other promoters have been shown to direct RNA synthesis at higher levels only in particular types of cells or tissues and are often referred to as “tissue specific promoters”, or “tissue-preferred promoters” if the promoters direct RNA synthesis preferably in certain tissues but also in other tissues at reduced levels. Since patterns of expression of a chimeric gene (or genes) introduced into a plant are controlled using promoters, there is an ongoing interest in the isolation of novel promoters which are capable of controlling the expression of a chimeric gene or (genes) at certain levels in specific tissue types or at specific plant developmental stages.

[0387] New promoters of various types useful in plant cells are constantly being discovered; numerous examples may be found in the compilation by Okamuro and Goldberg, (1989) In The Biochemistry of Plants, Vol. 115, Stumpf and Conn, eds (New York, N.Y.: Academic Press), pp. 1-82.

[0388] “Translation leader sequence” refers to a polynucleotide sequence located between the promoter sequence of a gene and the coding sequence. The translation leader sequence is present in the mRNA upstream of the translation start sequence. The translation leader sequence may affect processing of the primary transcript to mRNA, mRNA stability or translation efficiency. Examples of translation leader sequences have been described (e.g., Turner and Foster, (1995) Mol Biotechnol 3:225-236).

[0389] “3′ non-coding sequences”, “transcription terminator” or “termination sequences” refer to DNA sequences located downstream of a coding sequence and include polyadenylation recognition sequences and other sequences encoding regulatory signals capable of affecting mRNA processing or gene expression. The polyadenylation signal is usually characterized by affecting the addition of polyadenylic acid tracts to the 3′ end of the mRNA precursor. The use of different 3′ non-coding sequences is exemplified by Ingelbrecht et al., (1989) Plant Cell 1:671-680.

[0390] “RNA transcript” refers to the product resulting from RNA polymerase-catalyzed transcription of a DNA sequence. When the RNA transcript is a perfect complimentary copy of the DNA sequence, it is referred to as the primary transcript or pre-mRNA. A RNA transcript is referred to as the mature RNA or mRNA when it is a RNA sequence derived from post-transcriptional processing of the primary transcript pre mRNAt. “Messenger RNA” or “mRNA” refers to the RNA that is without introns and that can be translated into protein by the cell. “cDNA” refers to a DNA that is complementary to, and synthesized from, a mRNA template using the enzyme reverse transcriptase. The cDNA can be single-stranded or converted into double-stranded form using the Klenow fragment of DNA polymerase I. “Sense” RNA refers to RNA transcript that includes the mRNA and can be translated into protein within a cell or in vitro. “Antisense RNA” refers to an RNA transcript that is complementary to all or part of a target primary transcript or mRNA, and that blocks the expression of a target gene (see, e.g., U.S. Pat. No. 5,107,065). The complementarity of an antisense RNA may be with any part of the specific gene transcript, i.e., at the 5′ non-coding sequence, 3′ non-coding sequence, introns, or the coding sequence. “Functional RNA” includes antisense RNA, ribozyme RNA, or other RNA that may not be translated but yet has an effect on cellular processes. The terms “complement” and “reverse complement” are used interchangeably herein with respect to mRNA transcripts, and are meant to define the antisense RNA of the message.

[0391] The term “operably linked” refers to the association of nucleic acid sequences on a single nucleic acid fragment so that the function of one is regulated by the other. For example, a promoter is operably linked with a coding sequence when it is capable of regulating the expression of that coding sequence (i.e., the coding sequence is under the transcriptional control of the promoter). Coding sequences can be operably linked to regulatory sequences in a sense or antisense orientation. In another example, the complementary RNA regions can be operably linked, either directly or indirectly, 5′ to the target mRNA, or 3′ to the target mRNA, or within the target mRNA, or a first complementary region is 5′ and its complement is 3′ to the target m RNA.

[0392] Standard recombinant DNA and molecular cloning techniques used herein are well known in the art and are described more fully in Sambrook et al., Molecular Cloning: A Laboratory Manual; Cold Spring Harbor Laboratory: Cold Spring Harbor, NY (1989). Transformation methods are well known to those skilled in the art and are described infra.

[0393] “PCR” or “polymerase chain reaction” is a technique for the synthesis of specific DNA segments and consists of a series of repetitive denaturation, annealing, and extension cycles. Typically, a double-stranded DNA is heat denatured, and two primers complementary to the 3′ boundaries of the target segment are annealed to the DNA at low temperature, and then extended at an intermediate temperature. One set of these three consecutive steps is referred to as a “cycle”.

[0394] The term “recombinant” refers to an artificial combination of two otherwise separated segments of sequence, e.g., by chemical synthesis, or manipulation of isolated segments of nucleic acids by genetic engineering techniques.

[0395] The terms “plasmid”, “vector” and “cassette” refer to an extra chromosomal element often carrying genes that are not part of the central metabolism of the cell, and usually in the form of double-stranded DNA. Such elements may be autonomously replicating sequences, genome integrating sequences, phage, or nucleotide sequences, in linear or circular form, of a single- or double-stranded DNA or RNA, derived from any source, in which a number of nucleotide sequences have been joined or recombined into a unique construction which is capable of introducing a polynucleotide of interest into a cell. “Transformation cassette” refers to a specific vector containing a gene and having elements in addition to the gene that facilitates transformation of a particular host cell. “Expression cassette” refers to a specific vector containing a gene and having elements in addition to the gene that allow for expression of that gene in a host.

[0396] The terms “recombinant DNA molecule”, “recombinant construct”, “expression construct”, “construct”, “construct”, and “recombinant DNA construct” are used interchangeably herein. A recombinant construct comprises an artificial combination of nucleic acid fragments, e.g., regulatory and coding sequences that are not all found together in nature. For example, a construct may comprise regulatory sequences and coding sequences that are derived from different sources, or regulatory sequences and coding sequences derived from the same source, but arranged in a manner different than that found in nature. Such a construct may be used by itself or may be used in conjunction with a vector. If a vector is used, then the choice of vector is dependent upon the method that will be used to transform host cells as is well known to those skilled in the art. For example, a plasmid vector can be used. The skilled artisan is well aware of the genetic elements that must be present on the vector in order to successfully transform, select and propagate host cells. The skilled artisan will also recognize that different independent transformation events may result in different levels and patterns of expression (Jones et al., (1985) EMBO J 4:2411-2418; De Almeida et al., (1989) Mol Gen Genetics 218:78-86), and thus that multiple events are typically screened in order to obtain lines displaying the desired expression level and pattern. Such screening may be accomplished standard molecular biological, biochemical, and other assays including Southern analysis of DNA, Northern analysis of mRNA expression, PCR, real time quantitative PCR (qPCR), reverse transcription PCR (RT-PCR), immunoblotting analysis of protein expression, enzyme or activity assays, and/or phenotypic analysis.

[0397] The term “expression”, as used herein, refers to the production of a functional end-product (e.g., an mRNA, guide RNA, or a protein) in either precursor or mature form.

[0398] The term “introduced” means providing a nucleic acid (e.g., expression construct) or protein into a cell. Introduced includes reference to the incorporation of a nucleic acid into a eukaryotic or prokaryotic cell where the nucleic acid may be incorporated into the genome of the cell, and includes reference to the transient provision of a nucleic acid or protein to the cell. Introduced includes reference to stable or transient transformation methods, as well as sexually crossing. Thus, “introduced” in the context of inserting a nucleic acid fragment (e.g., a recombinant DNA construct/expression construct) into a cell, means “transfection” or “transformation” or “transduction” and includes reference to the incorporation of a nucleic acid fragment into a eukaryotic or prokaryotic cell where the nucleic acid fragment may be incorporated into the genome of the cell (e.g., chromosome, plasmid, plastid, or mitochondrial DNA), converted into an autonomous replicon, or transiently expressed (e.g., transfected mRNA).

[0399] “Mature” protein refers to a post-translationally processed polypeptide (i.e., one from which any pre- or propeptides present in the primary translation product have been removed). “Precursor” protein refers to the primary product of translation of mRNA (i.e., with pre- and propeptides still present). Pre- and propeptides may be but are not limited to intracellular localization signals.

[0400] “Stable transformation” refers to the transfer of a nucleic acid fragment into a genome of a host organism, including both nuclear and organellar genomes, resulting in genetically stable inheritance. In contrast, “transient transformation” refers to the transfer of a nucleic acid fragment into the nucleus, or other DNA-containing organelle, of a host organism resulting in gene expression without integration or stable inheritance. Host organisms containing the transformed nucleic acid fragments are referred to as “transgenic” organisms.

[0401] The commercial development of genetically improved germplasm has also advanced to the stage of introducing multiple traits into crop plants, often referred to as a gene stacking approach. In this approach, multiple genes conferring different characteristics of interest can be introduced into a plant. Gene stacking can be accomplished by many means including but not limited to co-transformation, retransformation, and crossing lines with different genes of interest.

[0402] The term “plant” refers to whole plants, plant organs, plant tissues, seeds, plant cells, seeds and progeny of the same. Plant cells include, without limitation, cells from seeds, suspension cultures, embryos, meristematic regions, callus tissue, leaves, roots, shoots, gametophytes, sporophytes, pollen and microspores. Plant parts include differentiated and undifferentiated tissues including, but not limited to roots, stems, shoots, leaves, pollens, seeds, tumor tissue and various forms of cells and culture (e.g., single cells, protoplasts, embryos, and callus tissue). The plant tissue may be in plant or in a plant organ, tissue or cell culture. The term “plant organ” refers to plant tissue or a group of tissues that constitute a morphologically and functionally distinct part of a plant. The term “genome” refers to the entire complement of genetic material (genes and non-coding sequences) that is present in each cell of an organism, or virus or organelle; and/or a complete set of chromosomes inherited as a (haploid) unit from one parent. “Progeny” comprises any subsequent generation of a plant.

[0403] A transgenic plant includes, for example, a plant which comprises within its genome a heterologous polynucleotide introduced by a transformation step. The heterologous polynucleotide can be stably integrated within the genome such that the polynucleotide is passed on to successive generations. The heterologous polynucleotide may be integrated into the genome alone or as part of a recombinant DNA construct. A transgenic plant can also comprise more than one heterologous polynucleotide within its genome. Each heterologous polynucleotide may confer a different trait to the transgenic plant. A heterologous polynucleotide can include a sequence that originates from a foreign species, or, if from the same species, can be substantially modified from its native form. Transgenic can include any cell, cell line, callus, tissue, plant part or plant, the genotype of which has been altered by the presence of heterologous nucleic acid including those transgenics initially so altered as well as those created by sexual crosses or asexual propagation from the initial transgenic. The alterations of the genome (chromosomal or extra-chromosomal) by conventional plant breeding methods, by the genome editing procedure described herein that does not result in an insertion of a foreign polynucleotide, or by naturally occurring events such as random cross-fertilization, non-recombinant viral infection, non-recombinant bacterial transformation, non-recombinant transposition, or spontaneous mutation are not intended to be regarded as transgenic.

[0404] In certain embodiments of the disclosure, a fertile plant is a plant that produces viable male and female gametes and is self-fertile. Such a self-fertile plant can produce a progeny plant without the contribution from any other plant of a gamete and the genetic material contained therein. Other embodiments of the disclosure can involve the use of a plant that is not self-fertile because the plant does not produce male gametes, or female gametes, or both, that are viable or otherwise capable of fertilization. As used herein, a “male sterile plant” is a plant that does not produce male gametes that are viable or otherwise capable of fertilization. As used herein, a “female sterile plant” is a plant that does not produce female gametes that are viable or otherwise capable of fertilization. It is recognized that male-sterile and female-sterile plants can be female-fertile and male-fertile, respectively. It is further recognized that a male fertile (but female sterile) plant can produce viable progeny when crossed with a female fertile plant and that a female fertile (but male sterile) plant can produce viable progeny when crossed with a male fertile plant.

[0405] A “centimorgan” (cM) or “map unit” is the distance between two linked genes, markers, target sites, loci, or any pair thereof, wherein 1% of the products of meiosis are recombinant. Thus, a centimorgan is equivalent to a distance equal to an 1% average recombination frequency between the two linked genes, markers, target sites, loci, or any pair thereof.

[0406] Breeding Methods and Methods for Selecting Plants Utilizing a Two Component RNA Guide and Cas Endonuclease System

[0407] The present disclosure finds use in the breeding of plants comprising one or more transgenic traits. Most commonly, transgenic traits are randomly inserted throughout the plant genome as a consequence of transformation systems based on Agrobacterium, biolistics, or other commonly used procedures. More recently, gene targeting protocols have been developed that enable directed transgene insertion. One important technology, site-specific integration (SSI) enables the targeting of a transgene to the same chromosomal location as a previously inserted transgene. Custom-designed meganucleases and custom-designed zinc finger meganucleases allow researchers to design nucleases to target specific chromosomal locations, and these reagents allow the targeting of transgenes at the chromosomal site cleaved by these nucleases.

[0408] The currently used systems for precision genetic engineering of eukaryotic genomes, e.g. plant genomes, rely upon homing endonucleases, meganucleases, zinc finger nucleases, and transcription activator-like effector nucleases (TALENs), which require de novo protein engineering for every new target locus. The highly specific, RNA-directed DNA nuclease, guide RNA/Cas9 endonuclease system described herein, is more easily customizable and therefore more useful when modification of many different target sequences is the goal. This disclosure takes further advantage of the two component nature of the guide RNA/Cas system, with its constant protein component, the Cas endonuclease, and its variable and easily reprogrammable targeting component, the guide RNA or the crRNA.

[0409] The guide RNA/Cas system described herein is especially useful for genome engineering, especially plant genome engineering, in circumstances where nuclease off-target cutting can be toxic to the targeted cells. In one embodiment of the guide RNA/Cas system described herein, the constant component, in the form of an expression-optimized Cas9 gene, is stably integrated into the target genome, e.g. plant genome. Expression of the Cas9 gene is under control of a promoter, e.g. plant promoter, which can be a constitutive promoter, tissue-specific promoter or inducible promoter, e.g. temperature-inducible, stress-inducible, developmental stage inducible, or chemically inducible promoter. In the absence of the variable component, i.e. the guide RNA or crRNA, the Cas9 protein is not able to cut DNA and therefore its presence in the plant cell should have little or no consequence. Hence a key advantage of the guide RNA/Cas system described herein is the ability to create and maintain a cell line or transgenic organism capable of efficient expression of the Cas9 protein with little or no consequence to cell viability. In order to induce cutting at desired genomic sites to achieve targeted genetic modifications, guide RNAs or crRNAs can be introduced by a variety of methods into cells containing the stably-integrated and expressed cas9 gene. For example, guide RNAs or crRNAs can be chemically or enzymatically synthesized, and introduced into the Cas9 expressing cells via direct delivery methods such a particle bombardment or electroporation.

[0410] Alternatively, genes capable of efficiently expressing guide RNAs or crRNAs in the target cells can be synthesized chemically, enzymatically or in a biological system, and these genes can be introduced into the Cas9 expressing cells via direct delivery methods such a particle bombardment, electroporation or biological delivery methods such as Agrobacterium mediated DNA delivery.

[0411] In one embodiment, the method comprises a method for introducing a polynucleotide of interest into a plant genome without introducing an exogenous selectable marker into said plant genome, the method comprising providing a first guide RNA, a first polynucleotide modification template, a second guide RNA, a second polynucleotide modification template, and a Cas endonuclease to a plant cell comprising a first endogenous gene that can be modified to confer herbicide resistance, wherein said first guide RNA and Cas endonuclease are capable of forming a first complex that enables the Cas endonuclease to introduce a double strand break at a first target site located in or near said first endogenous gene in the genome of said plant cell, wherein said first polynucleotide modification template comprises at least one nucleotide modification of said first endogenous gene to render said endogenous gene capable of conferring herbicide resistance to a plant cell, wherein said second guide RNA and Cas endonuclease are capable of forming a second complex that enables the Cas endonuclease to introduce a double strand break at a second target site in the genome of said plant cell, wherein said second polynucleotide modification template comprises at least one polynucleotide of interest to be introduced into said plant genome.

[0412] As disclosed herein, a guide RNA/Cas system mediating gene targeting without incorporating a selectable transgene marker can be used in methods for directing transgene insertion and/or for producing complex transgenic trait loci comprising multiple transgenes in a fashion similar as disclosed in WO2013/0198888 (published Aug. 1, 2013) where instead of using a double strand break inducing agent to introduce a gene of interest, a guide RNA/Cas system or a guide polynucleotide/Cas system as disclosed herein is used. In one embodiment, a complex transgenic trait locus is a genomic locus that has multiple transgenes genetically linked to each other. By inserting independent transgenes within 0.1, 0.2, 0.3, 04, 0.5, 1, 2, or even 5 centimorgans (cM) from each other, the transgenes can be bred as a single genetic locus (see, for example, U.S. patent application Ser. No. 13/427,138) or PCT application PCT/US2012/030061. After selecting a plant comprising a transgene, plants containing (at least) one transgenes can be crossed to form an F1 that contains both transgenes. In progeny from these F1 (F2 or BC1) 1/500 progeny would have the two different transgenes recombined onto the same chromosome. The complex locus can then be bred as single genetic locus with both transgene traits. This process can be repeated to stack as many traits as desired.

[0413] Chromosomal intervals that correlate with a phenotype or trait of interest can be identified. A variety of methods well known in the art are available for identifying chromosomal intervals. The boundaries of such chromosomal intervals are drawn to encompass markers that will be linked to the gene controlling the trait of interest. In other words, the chromosomal interval is drawn such that any marker that lies within that interval (including the terminal markers that define the boundaries of the interval) can be used as a marker for northern leaf blight resistance. In one embodiment, the chromosomal interval comprises at least one QTL, and furthermore, may indeed comprise more than one QTL. Close proximity of multiple QTLs in the same interval may obfuscate the correlation of a particular marker with a particular QTL, as one marker may demonstrate linkage to more than one QTL. Conversely, e.g., if two markers in close proximity show co-segregation with the desired phenotypic trait, it is sometimes unclear if each of those markers identify the same QTL or two different QTL. The term “quantitative trait locus” or “QTL” refers to a region of DNA that is associated with the differential expression of a quantitative phenotypic trait in at least one genetic background, e.g., in at least one breeding population. The region of the QTL encompasses or is closely linked to the gene or genes that affect the trait in question. An “allele of a QTL” can comprise multiple genes or other genetic factors within a contiguous genomic region or linkage group, such as a haplotype. An allele of a QTL can denote a haplotype within a specified window wherein said window is a contiguous genomic region that can be defined, and tracked, with a set of one or more polymorphic markers. A haplotype can be defined by the unique fingerprint of alleles at each marker within the specified window.

[0414] A variety of methods are available to identify those cells having an altered genome at or near a target site without using a screenable marker phenotype. Such methods can be viewed as directly analyzing a target sequence to detect any change in the target sequence, including but not limited to PCR methods, sequencing methods, nuclease digestion, Southern blots, and any combination thereof.

[0415] Proteins may be altered in various ways including amino acid substitutions, deletions, truncations, and insertions. Methods for such manipulations are generally known. For example, amino acid sequence variants of the protein(s) can be prepared by mutations in the DNA. Methods for mutagenesis and nucleotide sequence alterations include, for example, Kunkel, (1985) Proc. Natl. Acad. Sci. USA 82:488-92; Kunkel et al., (1987) Meth Enzymol 154:367-82; U.S. Pat. No. 4,873,192; Walker and Gaastra, eds. (1983) Techniques in Molecular Biology (MacMillan Publishing Company, New York) and the references cited therein. Guidance regarding amino acid substitutions not likely to affect biological activity of the protein is found, for example, in the model of Dayhoff et al., (1978) Atlas of Protein Sequence and Structure (Natl Biomed Res Found, Washington, D.C.). Conservative substitutions, such as exchanging one amino acid with another having similar properties, may be preferable. Conservative deletions, insertions, and amino acid substitutions are not expected to produce radical changes in the characteristics of the protein, and the effect of any substitution, deletion, insertion, or combination thereof can be evaluated by routine screening assays. Assays for double-strand-break-inducing activity are known and generally measure the overall activity and specificity of the agent on DNA substrates containing target sites.

[0416] A variety of methods are known for the introduction of nucleotide sequences and polypeptides into an organism, including, for example, transformation, sexual crossing, and the introduction of the polypeptide, DNA, or mRNA into the cell.

[0417] Methods for contacting, providing, and/or introducing a composition into various organisms are known and include but are not limited to, stable transformation methods, transient transformation methods, virus-mediated methods, and sexual breeding. Stable transformation indicates that the introduced polynucleotide integrates into the genome of the organism and is capable of being inherited by progeny thereof. Transient transformation indicates that the introduced composition is only temporarily expressed or present in the organism.

[0418] Protocols for introducing polynucleotides and polypeptides into plants may vary depending on the type of plant or plant cell targeted for transformation, such as monocot or dicot. Suitable methods of introducing polynucleotides and polypeptides into plant cells and subsequent insertion into the plant genome include microinjection (Crossway et al., (1986) Biotechniques 4:320-34 and U.S. Pat. No. 6,300,543), meristem transformation (U.S. Pat. No. 5,736,369), electroporation (Riggs et al., (1986) Proc. Natl. Acad. Sci. USA 83:5602-6, Agrobacterium-mediated transformation (U.S. Pat. Nos. 5,563,055 and 5,981,840), direct gene transfer (Paszkowski et al., (1984) EMBO J 3:2717-22), and ballistic particle acceleration (U.S. Pat. Nos. 4,945,050; 5,879,918; 5,886,244; 5,932,782; Tomes et al., (1995) “Direct DNA Transfer into Intact Plant Cells via Microprojectile Bombardment” in Plant Cell, Tissue, and Organ Culture: Fundamental Methods, ed. Gamborg & Phillips (Springer-Verlag, Berlin); McCabe et al., (1988) Biotechnology 6:923-6; Weissinger et al., (1988) Ann Rev Genet 22:421-77; Sanford et al., (1987) Particulate Science and Technology 5:27-37 (onion); Christou et al., (1988) Plant Physiol 87:671-4 (soybean); Finer and McMullen, (1991) In Vitro Cell Dev Biol 27P:175-82 (soybean); Singh et al., (1998) Theor Appl Genet 96:319-24 (soybean); Datta et al., (1990) Biotechnology 8:736-40 (rice); Klein et al., (1988) Proc. Natl. Acad. Sci. USA 85:4305-9 (maize); Klein et al., (1988) Biotechnology 6:559-63 (maize); U.S. Pat. Nos. 5,240,855; 5,322,783 and 5,324,646; Klein et al., (1988) Plant Physiol 91:440-4 (maize); Fromm et al., (1990) Biotechnology 8:833-9 (maize); Hooykaas-Van Slogteren et al., (1984) Nature 311:763-4; U.S. Pat. No. 5,736,369 (cereals); Bytebier et al., (1987) Proc. Natl. Acad. Sci. USA 84:5345-9 (Liliaceae); De Wet et al., (1985) in The Experimental Manipulation of Ovule Tissues, ed. Chapman et al., (Longman, N.Y.), pp. 197-209 (pollen); Kaeppler et al., (1990) Plant Cell Rep 9:415-8) and Kaeppler et al., (1992) Theor Appl Genet 84:560-6 (whisker-mediated transformation); D'Halluin et al., (1992) Plant Cell 4:1495-505 (electroporation); Li et al., (1993) Plant Cell Rep 12:250-5; Christou and Ford (1995) Annals Botany 75:407-13 (rice) and Osjoda et al., (1996) Nat Biotechnol 14:745-50 (maize via Agrobacterium tumefaciens).

[0419] Alternatively, polynucleotides may be introduced into plants by contacting plants with a virus or viral nucleic acids. Generally, such methods involve incorporating a polynucleotide within a viral DNA or RNA molecule. In some examples a polypeptide of interest may be initially synthesized as part of a viral polyprotein, which is later processed by proteolysis in vivo or in vitro to produce the desired recombinant protein. Methods for introducing polynucleotides into plants and expressing a protein encoded therein, involving viral DNA or RNA molecules, are known, see, for example, U.S. Pat. Nos. 5,889,191, 5,889,190, 5,866,785, 5,589,367 and 5,316,931. Transient transformation methods include, but are not limited to, the introduction of polypeptides, such as a double-strand break inducing agent, directly into the organism, the introduction of polynucleotides such as DNA and/or RNA polynucleotides, and the introduction of the RNA transcript, such as an mRNA encoding a double-strand break inducing agent, into the organism. Such methods include, for example, microinjection or particle bombardment. See, for example Crossway et al., (1986) Mol Gen Genet 202:179-85; Nomura et al., (1986) Plant Sci 44:53-8; Hepler et al., (1994) Proc. Natl. Acad. Sci. USA 91:2176-80; and, Hush et al., (1994) J Cell Sci 107:775-84.

[0420] The term “dicot” refers to the subclass of angiosperm plants also knows as “dicotyledoneae” and includes reference to whole plants, plant organs (e.g., leaves, stems, roots, etc.), seeds, plant cells, and progeny of the same. Plant cell, as used herein includes, without limitation, seeds, suspension cultures, embryos, meristematic regions, callus tissue, leaves, roots, shoots, gametophytes, sporophytes, pollen, and microspores.

[0421] The term “crossed” or “cross” or “crossing” in the context of this disclosure means the fusion of gametes via pollination to produce progeny (i.e., cells, seeds, or plants). The term encompasses both sexual crosses (the pollination of one plant by another) and selfing (self-pollination, i.e., when the pollen and ovule (or microspores and megaspores) are from the same plant or genetically identical plants).

[0422] The term “introgression” refers to the transmission of a desired allele of a genetic locus from one genetic background to another. For example, introgression of a desired allele at a specified locus can be transmitted to at least one progeny plant via a sexual cross between two parent plants, where at least one of the parent plants has the desired allele within its genome. Alternatively, for example, transmission of an allele can occur by recombination between two donor genomes, e.g., in a fused protoplast, where at least one of the donor protoplasts has the desired allele in its genome. The desired allele can be, e.g., a transgene, a modified (mutated or edited) native allele, or a selected allele of a marker or QTL.

[0423] Standard DNA isolation, purification, molecular cloning, vector construction, and verification/characterization methods are well established, see, for example Sambrook et al., (1989) Molecular Cloning: A Laboratory Manual, (Cold Spring Harbor Laboratory Press, NY). Vectors and constructs include circular plasmids, and linear polynucleotides, comprising a polynucleotide of interest and optionally other components including linkers, adapters, regulatory regions, introns, restriction sites, enhancers, insulators, selectable markers, nucleotide sequences of interest, promoters, and/or other sites that aid in vector construction or analysis. In some examples a recognition site and/or target site can be contained within an intron, coding sequence, 5′ UTRs, 3′ UTRs, and/or regulatory regions.

[0424] The present disclosure further provides expression constructs for expressing in a plant, plant cell, or plant part a guide RNA/Cas system that is capable of binding to and creating a double strand break in a target site. In one embodiment, the expression constructs of the disclosure comprise a promoter operably linked to a nucleotide sequence encoding a Cas gene and a promoter operably linked to a guide RNA of the present disclosure. The promoter is capable of driving expression of an operably linked nucleotide sequence in a plant cell.

[0425] A promoter is a region of DNA involved in recognition and binding of RNA polymerase and other proteins to initiate transcription. A plant promoter is a promoter capable of initiating transcription in a plant cell, for a review of plant promoters, see, Potenza et al., (2004) In Vitro Cell Dev Biol 40:1-22. Constitutive promoters include, for example, the core promoter of the Rsyn7 promoter and other constitutive promoters disclosed in WO99/43838 and U.S. Pat. No. 6,072,050; the core CaMV 35S promoter (Odell et al., (1985) Nature 313:810-2); rice actin (McElroy et al., (1990) Plant Cell 2:163-71); ubiquitin (Christensen et al., (1989) Plant Mol Biol 12:619-32; Christensen et al., (1992) Plant Mol Biol 18:675-89); pEMU (Last et al., (1991) Theor Appl Genet 81:581-8); MAS (Velten et al., (1984) EMBO J 3:2723-30); ALS promoter (U.S. Pat. No. 5,659,026), and the like. Other constitutive promoters are described in, for example, U.S. Pat. Nos. 5,608,149; 5,608,144; 5,604,121; 5,569,597; 5,466,785; 5,399,680; 5,268,463; 5,608,142 and 6,177,611. In some examples an inducible promoter may be used. Pathogen-inducible promoters induced following infection by a pathogen include, but are not limited to those regulating expression of PR proteins, SAR proteins, beta-1,3-glucanase, chitinase, etc.

[0426] Chemical-regulated promoters can be used to modulate the expression of a gene in a plant through the application of an exogenous chemical regulator. The promoter may be a chemical-inducible promoter, where application of the chemical induces gene expression, or a chemical-repressible promoter, where application of the chemical represses gene expression. Chemical-inducible promoters include, but are not limited to, the maize In2-2 promoter, activated by benzene sulfonamide herbicide safeners (De Veylder et al., (1997) Plant Cell Physiol 38:568-77), the maize GST promoter (GST-II-27, WO93/01294), activated by hydrophobic electrophilic compounds used as pre-emergent herbicides, and the tobacco PR-1a promoter (Ono et al., (2004) Biosci Biotechnol Biochem 68:803-7) activated by salicylic acid. Other chemical-regulated promoters include steroid-responsive promoters (see, for example, the glucocorticoid-inducible promoter (Schena et al., (1991) Proc. Natl. Acad. Sci. USA 88:10421-5; McNellis et al., (1998) Plant J 14:247-257); tetracycline-inducible and tetracycline-repressible promoters (Gatz et al., (1991) Mol Gen Genet 227:229-37; U.S. Pat. Nos. 5,814,618 and 5,789,156).

[0427] Tissue-preferred promoters can be utilized to target enhanced expression within a particular plant tissue. Tissue-preferred promoters include, for example, Kawamata et al., (1997) Plant Cell Physiol 38:792-803; Hansen et al., (1997) Mol Gen Genet 254:337-43; Russell et al., (1997) Transgenic Res 6:157-68; Rinehart et al., (1996) Plant Physiol 112:1331-41; Van Camp et al., (1996) Plant Physiol 112:525-35; Canevascini et al., (1996) Plant Physiol 112:513-524; Lam, (1994) Results Probl Cell Differ 20:181-96; and Guevara-Garcia et al., (1993) Plant J 4:495-505. Leaf-preferred promoters include, for example, Yamamoto et al., (1997) Plant J 12:255-65; Kwon et al., (1994) Plant Physiol 105:357-67; Yamamoto et al., (1994) Plant Cell Physiol 35:773-8; Gotor et al., (1993) Plant J 3:509-18; Orozco et al., (1993) Plant Mol Biol 23:1129-38; Matsuoka et al., (1993) Proc. Natl. Acad. Sci. USA 90:9586-90; Simpson et al., (1958) EMBO J 4:2723-9; Timko et al., (1988) Nature 318:57-8. Root-preferred promoters include, for example, Hire et al., (1992) Plant Mol Biol 20:207-18 (soybean root-specific glutamine synthase gene); Miao et al., (1991) Plant Cell 3:11-22 (cytosolic glutamine synthase (GS)); Keller and Baumgartner, (1991) Plant Cell 3:1051-61 (root-specific control element in the GRP 1.8 gene of French bean); Sanger et al., (1990) Plant Mol Biol 14:433-43 (root-specific promoter of A. tumefaciens mannopine synthase (MAS)); Bogusz et al., (1990) Plant Cell 2:633-41 (root-specific promoters isolated from Parasponia andersonii and Trema tomentosa); Leach and Aoyagi, (1991) Plant Sci 79:69-76 (A. rhizogenes roIC and roID root-inducing genes); Teeri et al., (1989) EMBO J 8:343-50 (Agrobacterium wound-induced TR1′ and TR2′ genes); VfENOD-GRP3 gene promoter (Kuster et al., (1995) Plant Mol Biol 29:759-72); and roIB promoter (Capana et al., (1994) Plant Mol Biol 25:681-91; phaseolin gene (Murai et al., (1983) Science 23:476-82; Sengopta-Gopalen et al., (1988) Proc. Natl. Acad. Sci. USA 82:3320-4). See also, U.S. Pat. Nos. 5,837,876; 5,750,386; 5,633,363; 5,459,252; 5,401,836; 5,110,732 and 5,023,179.

[0428] Seed-preferred promoters include both seed-specific promoters active during seed development, as well as seed-germinating promoters active during seed germination. See, Thompson et al., (1989) BioEssays 10:108. Seed-preferred promoters include, but are not limited to, Cim1 (cytokinin-induced message); cZ19B1 (maize 19 kDa zein); and milps (myo-inositol-1-phosphate synthase); (WO00/11177; and U.S. Pat. No. 6,225,529). For dicots, seed-preferred promoters include, but are not limited to, bean β-phaseolin, napin, β-conglycinin, soybean lectin, cruciferin, and the like. For monocots, seed-preferred promoters include, but are not limited to, maize 15 kDa zein, 22 kDa zein, 27 kDa gamma zein, waxy, shrunken 1, shrunken 2, globulin 1, oleosin, and nuc1. See also, WO00/12733, where seed-preferred promoters from END1 and END2 genes are disclosed.

[0429] A phenotypic marker is a screenable or selectable marker that includes visual markers and selectable markers whether it is a positive or negative selectable marker. Any phenotypic marker can be used. Specifically, a selectable or screenable marker comprises a DNA segment that allows one to identify, or select for or against a molecule or a cell that contains it, often under particular conditions. These markers can encode an activity, such as, but not limited to, production of RNA, peptide, or protein, or can provide a binding site for RNA, peptides, proteins, inorganic and organic compounds or compositions and the like.

[0430] Examples of selectable markers include, but are not limited to, DNA segments that comprise restriction enzyme sites; DNA segments that encode products which provide resistance against otherwise toxic compounds including antibiotics, such as, spectinomycin, ampicillin, kanamycin, tetracycline, Basta, neomycin phosphotransferase II (NEO) and hygromycin phosphotransferase (HPT)); DNA segments that encode products which are otherwise lacking in the recipient cell (e.g., tRNA genes, auxotrophic markers); DNA segments that encode products which can be readily identified (e.g., phenotypic markers such as β-galactosidase, GUS; fluorescent proteins such as green fluorescent protein (GFP), cyan (CFP), yellow (YFP), red (RFP), and cell surface proteins); the generation of new primer sites for PCR (e.g., the juxtaposition of two DNA sequence not previously juxtaposed), the inclusion of DNA sequences not acted upon or acted upon by a restriction endonuclease or other DNA modifying enzyme, chemical, etc.; and, the inclusion of a DNA sequences required for a specific modification (e.g., methylation) that allows its identification.

[0431] Additional selectable markers include genes that confer resistance to herbicidal compounds, such as glufosinate ammonium, bromoxynil, imidazolinones, and 2,4-dichlorophenoxyacetate (2,4-D). See for example, Yarranton, (1992) Curr Opin Biotech 3:506-11; Christopherson et al., (1992) Proc. Natl. Acad. Sci. USA 89:6314-8; Yao et al., (1992) Cell 71:63-72; Reznikoff, (1992) Mol Microbiol 6:2419-22; Hu et al., (1987) Cell 48:555-66; Brown et al., (1987) Cell 49:603-12; Figge et al., (1988) Cell 52:713-22; Deuschle et al., (1989) Proc. Natl. Acad. Sci. USA 86:5400-4; Fuerst et al., (1989) Proc. Natl. Acad. Sci. USA 86:2549-53; Deuschle et al., (1990) Science 248:480-3; Gossen, (1993) Ph.D. Thesis, University of Heidelberg; Reines et al., (1993) Proc. Natl. Acad. Sci. USA 90:1917-21; Labow et al., (1990) Mol Cell Biol 10:3343-56; Zambretti et al., (1992) Proc. Natl. Acad. Sci. USA 89:3952-6; Bairn et al., (1991) Proc. Natl. Acad. Sci. USA 88:5072-6; Wyborski et al., (1991) Nucleic Acids Res 19:4647-53; Hillen and Wissman, (1989) Topics Mol Struc Biol 10:143-62; Degenkolb et al., (1991) Antimicrob Agents Chemother 35:1591-5; Kleinschnidt et al., (1988) Biochemistry 27:1094-104; Bonin, (1993) Ph.D. Thesis, University of Heidelberg; Gossen et al., (1992) Proc. Natl. Acad. Sci. USA 89:5547-51; Oliva et al., (1992) Antimicrob Agents Chemother 36:913-9; Hlavka et al., (1985) Handbook of Experimental Pharmacology, Vol. 78 (Springer-Verlag, Berlin); Gill et al., (1988) Nature 334:721-4.

[0432] The cells having the introduced sequence may be grown or regenerated into plants using conventional conditions, see for example, McCormick et al., (1986) Plant Cell Rep 5:81-4. These plants may then be grown, and either pollinated with the same transformed strain or with a different transformed or untransformed strain, and the resulting progeny having the desired characteristic and/or comprising the introduced polynucleotide or polypeptide identified. Two or more generations may be grown to ensure that the polynucleotide is stably maintained and inherited, and seeds harvested.

[0433] Any plant can be used, including monocot and dicot plants. Examples of monocot plants that can be used include, but are not limited to, corn (Zea mays), rice (Oryza sativa), rye (Secale cereale), sorghum (Sorghum bicolor, Sorghum vulgare), millet (e.g., pearl millet (Pennisetum glaucum), proso millet (Panicum miliaceum), foxtail millet (Setaria italica), finger millet (Eleusine coracana)), wheat (Triticum aestivum), sugarcane (Saccharum spp.), oats (Avena), barley (Hordeum), switchgrass (Panicum virgatum), pineapple (Ananas comosus), banana (Musa spp.), palm, ornamentals, turfgrasses, and other grasses. Examples of dicot plants that can be used include, but are not limited to, soybean (Glycine max), canola (Brassica napus and B. campestris), alfalfa (Medicago sativa), tobacco (Nicotiana tabacum), Arabidopsis (Arabidopsis thaliana), sunflower (Helianthus annuus), cotton (Gossypium arboreum), and peanut (Arachis hypogaea), tomato (Solanum lycopersicum), potato (Solanum tuberosum) etc.

[0434] The transgenes, recombinant DNA molecules, DNA sequences of interest, and polynucleotides of interest can comprise one or more genes of interest. Such genes of interest can encode, for example, a protein that provides agronomic advantage to the plant.

[0435] Marker Assisted Selection and Breeding of Plants

[0436] A primary motivation for development of molecular markers in crop species is the potential for increased efficiency in plant breeding through marker assisted selection (MAS). Genetic marker alleles, or alternatively, quantitative trait loci (QTL alleles, are used to identify plants that contain a desired genotype at one or more loci, and that are expected to transfer the desired genotype, along with a desired phenotype to their progeny. Genetic marker alleles (or QTL alleles) can be used to identify plants that contain a desired genotype at one locus, or at several unlinked or linked loci (e.g., a haplotype), and that would be expected to transfer the desired genotype, along with a desired phenotype to their progeny. It will be appreciated that for the purposes of MAS, the term marker can encompass both marker and QTL loci.

[0437] After a desired phenotype and a polymorphic chromosomal locus, e.g., a marker locus or QTL, are determined to segregate together, it is possible to use those polymorphic loci to select for alleles corresponding to the desired phenotype—a process called marker-assisted selection (MAS). In brief, a nucleic acid corresponding to the marker nucleic acid is detected in a biological sample from a plant to be selected. This detection can take the form of hybridization of a probe nucleic acid to a marker, e.g., using allele-specific hybridization, southern blot analysis, northern blot analysis, in situ hybridization, hybridization of primers followed by PCR amplification of a region of the marker or the like. A variety of procedures for detecting markers are well known in the art. After the presence (or absence) of a particular marker in the biological sample is verified, the plant is selected, i.e., used to make progeny plants by selective breeding.

[0438] Plant breeders need to combine traits of interest with genes for high yield and other desirable traits to develop improved plant varieties. Screening for large numbers of samples can be expensive, time consuming, and unreliable. Use of markers, and/or genetically-linked nucleic acids is an effective method for selecting plant having the desired traits in breeding programs. For example, one advantage of marker-assisted selection over field evaluations is that MAS can be done at any time of year regardless of the growing season. Moreover, environmental effects are irrelevant to marker-assisted selection.

[0439] When a population is segregating for multiple loci affecting one or multiple traits, the efficiency of MAS compared to phenotypic screening becomes even greater because all the loci can be processed in the lab together from a single sample of DNA.

[0440] The DNA repair mechanisms of cells are the basis to introduce extraneous DNA or induce mutations on endogenous genes. DNA homologous recombination is a specialized way of DNA repair that the cells repair DNA damages using a homologous sequence. In plants, DNA homologous recombination happens at frequencies too low to be routinely used in gene targeting or gene editing until it has been found that the process can be stimulated by DNA double-strand breaks (Bibikova et al., (2001) Mol. Cell Biol. 21:289-297; Puchta and Baltimore, (2003) Science 300:763; Wright et al., (2005) Plant J. 44:693-705).

[0441] The meaning of abbreviations is as follows: “sec” means second(s), “min” means minute(s), “h” means hour(s), “d” means day(s), “μL” means microliter(s), “m L” means milliliter(s), “L” means liter(s), “μM” means micromolar, “mM” means millimolar, “M” means molar, “mmol” means millimole(s), “μmole” mean micromole(s), “g” means gram(s), “pg” means microgram(s), “ng” means nanogram(s), “U” means unit(s), “bp” means base pair(s) and “kb” means kilobase(s).

[0442] Also, as described herein, for each example or embodiment that cites a guide RNA, a similar guide polynucleotide can be designed wherein the guide polynucleotide does not solely comprise ribonucleic acids but wherein the guide polynucleotide comprises a combination of RNA-DNA molecules or solely comprises DNA molecules.

[0443] Non-limiting examples of compositions and methods disclosed herein are as follows:
[0444] 1. A method for producing a genetic modification into a second gene of a plant genome without introducing an exogenous selectable marker into said plant genome, the method comprising providing a first guide polynucleotide, a polynucleotide modification template, a second guide polynucleotide, and a Cas endonuclease to a plant cell comprising a first endogenous gene that can be modified to confer herbicide resistance, wherein said first guide polynucleotide and Cas endonuclease are capable of forming a first complex that enables the Cas endonuclease to introduce a double strand break at a first target site, located in or near said first endogenous gene in the genome of said plant cell, wherein said second guide polynucleotide and Cas endonuclease are capable of forming a second complex that enables the Cas endonuclease to introduce a double strand break at a second target site in the genome of said plant cell, wherein said polynucleotide modification template comprises at least one nucleotide alteration when compared to the first endogenous gene.
[0445] 2. The method of embodiment 1, wherein said at least one nucleotide alteration encodes for an amino acid change in first endogenous gene.
[0446] 3. The method of embodiment 1, wherein said first endogenous gene is modified to confer herbicide resistance to a plant cell.
[0447] 4. The method of embodiment 1, wherein said first endogenous gene is selected from the group consisting of an acetolactate synthase (ALS) and an enolpyruvylshikimate-3-phosphate synthase (EPSPS) gene.
[0448] 5. The method of embodiment 1, wherein the first target site and the second target site are located at two different genomic loci.
[0449] 6. The method of embodiment 4, wherein the endogenous ALS gene is modified to confer sulfonylurea resistance.
[0450] 7. The method of embodiment 4, wherein the endogenous EPSPS gene is modified to confer glyphosate resistance.
[0451] 8. The method of embodiment 1, wherein Cas endonuclease is a Cas9 endonuclease
[0452] 9. The method of embodiment 1, further comprising selecting at least one plant cell that has resistance to an herbicide and comprises a modification into said second gene, wherein said modification includes at least one deletion, insertion or substitution of one or more nucleotides in said second gene of the plant genome.
[0453] 10. The method of embodiment 9, wherein said herbicide is a sulphonylurea, such as chlorsulfuron or an imidazolinone herbicide.
[0454] 11. The method of embodiment 9, wherein said modification into said second gene includes at least one deletion, insertion, or substitution of one or more nucleotides in a FAD2-1 gene.
[0455] 12. A plant grown or cultured from the plant cell of embodiment 9, a seed thereof, or progeny thereof
[0456] 13. The plant of embodiment 12, wherein the plant is a monocot or a dicot.
[0457] 14. The plant of embodiment 13, wherein the monocot is selected from the group consisting of maize, rice, sorghum, rye, barley, wheat, millet, oats, sugarcane, turfgrass, or switchgrass.
[0458] 15. The plant of embodiment 13, wherein the dicot is selected from the group consisting of soybean, canola, alfalfa, sunflower, cotton, tobacco, peanut, potato, tobacco, Arabidopsis, or safflower.
[0459] 16. An herbicide resistant plant grown or cultured from the plant cell of embodiment 9, a seed thereof, or progeny thereof having herbicide resistance and a high oleic phenotype.
[0460] 17. A method for introducing a polynucleotide of interest into a plant genome without introducing an exogenous selectable marker into said plant genome, the method comprising providing a first guide RNA, a first polynucleotide modification template, a second guide RNA, a second polynucleotide modification template, and a Cas endonuclease to a plant cell comprising a first endogenous gene that can be modified to confer herbicide resistance, wherein said first guide RNA and Cas endonuclease are capable of forming a first complex that enables the Cas endonuclease to introduce a double strand break at a first target site located in or near said first endogenous gene in the genome of said plant cell, wherein said first polynucleotide modification template comprises at least one nucleotide modification of said first endogenous gene to render said endogenous gene capable of conferring herbicide resistance to a plant cell, wherein said second guide RNA and Cas endonuclease are capable of forming a second complex that enables the Cas endonuclease to introduce a double strand break at a second target site in the genome of said plant cell, wherein said second polynucleotide modification template comprises at least one polynucleotide of interest to be introduced into said plant genome.
[0461] 18. The method of embodiment 17, wherein the first target site and the second target site are located at two different genomic loci.
[0462] 19. The method of embodiment 17, wherein said first endogenous gene is selected from the group consisting of a plant acetolactate synthase (ALS) and a plant enolpyruvylshikimate-3-phosphate synthase (EPSPS) gene.
[0463] 20. The method of embodiment 17, wherein the endogenous ALS gene is modified to confer sulfonylurea resistance.
[0464] 21. The method of embodiment 17, wherein the endogenous EPSPS gene is modified to confer glyphosate resistance.
[0465] 22. The method of embodiment 17, wherein Cas endonuclease is a Cas9 endonuclease
[0466] 23. The method of embodiment 17, further comprising selecting at least one plant cell that has resistance to an herbicide and comprises said at least one polynucleotide of interest in said plant genome.
[0467] 24. The method of embodiment 17, wherein the at least one polynucleotide of interest is selected from the group consisting of herbicide-tolerance coding sequences, insecticidal coding sequences, nematicidal coding sequences, antimicrobial coding sequences, antifungal coding sequences, antiviral coding sequences, abiotic and biotic stress tolerance coding sequences, or sequences modifying plant traits such as yield, grain quality, nutrient content, starch quality and quantity, nitrogen fixation and/or utilization, and oil content and/or composition.
[0468] 25. The method of embodiment 23, wherein said herbicide is a sulphonylurea, such as chlorsulfuron or an imidazolinone herbicide.
[0469] 26. A plant grown or cultured from the plant cell of embodiment 23, a seed thereof, or progeny thereof
[0470] 27. The plant of embodiment 26, wherein the plant is a monocot or a dicot.
[0471] 28. An herbicide resistant plant grown or cultured from the plant cell of embodiment 23, a seed thereof, or progeny thereof having herbicide resistance and stably inherited the at least one polynucleotide of interest in said plant genome.
[0472] 29. A method for editing a second gene of a plant genome without introducing an exogenous selectable marker into said plant genome, the method comprising providing a first guide RNA, a first polynucleotide modification template, a second guide RNA, a second polynucleotide modification template, and a Cas endonuclease to a plant cell comprising a first endogenous gene that can be modified to confer herbicide resistance, wherein said first guide RNA and Cas endonuclease are capable of forming a complex that enables the Cas endonuclease to introduce a double strand break at a first target site (located in or near said first endogenous gene) in the genome of said plant cell, wherein said first polynucleotide modification template comprises at least one nucleotide modification of said first endogenous gene to render said endogenous gene capable of conferring herbicide resistance to a plant cell, wherein said second guide RNA and Cas endonuclease are capable of forming a complex that enables the Cas endonuclease to introduce a double strand break at a second target site (located at a different locus than said first endogenous gene) in the genome of said plant cell, wherein said second polynucleotide modification template comprises at least one nucleotide alteration when compared to the second gene to be edited.
[0473] 30. The method of embodiment 29, wherein said first endogenous gene is an acetolactate synthase (ALS) gene.
[0474] 31. The method of embodiment 29, wherein the endogenous ALS gene is modified to confer sulfonylurea resistance.
[0475] 32. The method of embodiment 29, wherein the second gene is an EPSPS gene modified to confer glyphosate resistance.
[0476] 33. The method of embodiment 29, wherein Cas endonuclease is a Cas9 endonuclease
[0477] 34. The method of embodiment 29, further comprising selecting at least one plant cell that has resistance to an herbicide and comprises a modified EPSPS gene that confers glyphosate resistance.
[0478] 35. The method of embodiment 34, wherein said herbicide is a sulphonylurea, such as chlorsulfuron or an imidazolinone herbicide.
[0479] 36. A plant grown or cultured from the plant cell of embodiment 34, a seed thereof, or progeny thereof
[0480] 37. The plant of embodiment 36, wherein the plant is a monocot or a dicot.
[0481] 38. A method of generating a glyphosate resistant soybean plant without introducing an exogenous selectable marker into said plant genome the method comprising providing a maize plant cell wherein its endogenous chromosomal ALS gene and endogenous chromosomal EPSPS gene have been modified through a guide RNA/Cas endonuclease system to produce a glyphosate resistant EPSPS protein and growing a maize plant from said maize plant cell, wherein said plant is resistant to glyphosate.

### EXAMPLES

[0482] In the following Examples, unless otherwise stated, parts and percentages are by weight and degrees are Celsius. It should be understood that these Examples, while indicating embodiments of the disclosure, are given by way of illustration only. From the above discussion and these Examples, one skilled in the art can make various changes and modifications of the disclosure to adapt it to various usages and conditions. Such modifications are also intended to fall within the scope of the appended claims.

### Example 1

### Maize Optimized Expression Cassettes for Guide RNA/Cas Endonuclease Based Genome Modification in Maize Plants

[0483] For genome engineering applications, the type II CRISPR/Cas system minimally requires the Cas9 protein and a duplexed crRNA/tracrRNA molecule or a synthetically fused crRNA and tracrRNA (guide RNA) molecule for DNA target site recognition and cleavage (Gasiunas et al. (2012) Proc. Natl. Acad. Sci. USA 109:E2579-86, Jinek et al. (2012) Science 337:816-21, Mali et al. (2013) Science 339:823-26, and Cong et al. (2013) Science 339:819-23). Described herein is a guideRNA/Cas endonuclease system that is based on the type II CRISPR/Cas system and consists of a Cas endonuclease and a guide RNA (or duplexed crRNA and tracrRNA) that together can form a complex that recognizes a genomic target site in a plant and introduces a double-strand-break into said target site.

[0484] To test the guide RNA/Cas endonuclease system in maize, the Cas9 gene from Streptococcus pyogenes M1 GAS (SF370) (SEQ ID NO: 1) was maize codon optimized per standard techniques known in the art and the potato ST-LS1 intron (SEQ ID NO: 2) was introduced in order to eliminate its expression in E. coli and Agrobacterium (FIG. 1 A). To facilitate nuclear localization of the Cas9 protein in maize cells, Simian virus 40 (SV40) monopartite amino terminal nuclear localization signal (MAPKKKRKV, SEQ ID NO: 3) and Agrobacterium tumefaciens bipartite VirD2 T-DNA border endonuclease carboxyl terminal nuclear localization signal (KRPRDRHDGELGGRKRAR, SEQ ID NO: 4) were incorporated at the amino and carboxyl-termini of the Cas9 open reading frame (FIG. 1 A), respectively. The maize optimized Cas9 gene was operably linked to a maize constitutive or regulated promoter by standard molecular biological techniques. An example of the maize optimized Cas9 expression cassette (SEQ ID NO: 5) is illustrated in FIG. 1 A. FIG. 1A shows a maize optimized Cas9 gene containing the ST-LS1 intron, SV40 amino terminal nuclear localization signal (NLS) and VirD2 carboxyl terminal NLS driven by a plant Ubiquitin promoter.

[0485] The second component necessary to form a functional guide RNA/Cas endonuclease system for genome engineering applications is a duplex of the crRNA and tracrRNA molecules or a synthetic fusing of the crRNA and tracrRNA molecules, a guide RNA. To confer efficient guide RNA expression (or expression of the duplexed crRNA and tracrRNA) in maize, the maize U6 polymerase III promoter (SEQ ID NO: 9) and maize U6 polymerase III terminator (first 8 bases of SEQ ID NO: 10) residing on chromosome 8 were isolated and operably fused to the termini of a guide RNA (FIG. 1 B) using standard molecular biology techniques. Two different guide RNA configurations were developed for testing in maize, a short guide RNA (SEQ ID NO: 11) based on Jinek et al. (2012) Science 337:816-21 and a long guide RNA (SEQ ID NO: 8) based on Mali et al. (2013) Science 339:823-26. An example expression cassette (SEQ ID NO: 12) is shown in FIG. 1 B which illustrates a maize U6 polymerase III promoter driving expression of a long guide RNA terminated with a U6 polymerase III terminator.

[0486] As shown in FIGS. 2 A and 2B, the guide RNA or crRNA molecule contains a region complementary to one strand of the double strand DNA target (referred to as the variable targeting domain) that is approximately 12-30 nucleotides in length and upstream of a PAM sequence (5′NGG3′ on antisense strand of FIG. 2A-2B, corresponding to 5′CCN3′ on sense strand of FIG. 2A-2B) for target site recognition and cleavage (Gasiunas et al. (2012) Proc. Natl. Acad. Sci. USA 109:E2579-86, Jinek et al. (2012) Science 337:816-21, Mali et al. (2013) Science 339:823-26, and Cong et al. (2013) Science 339:819-23). To facilitate the rapid introduction of maize genomic DNA target sequences into the crRNA or guide RNA expression constructs, two Type IIS BbsI restriction endonuclease target sites were introduced in an inverted tandem orientation with cleavage orientated in an outward direction as described in Cong et al. (2013) Science 339:819-23. Upon cleavage, the Type IIS restriction endonuclease excises its target sites from the crRNA or guide RNA expression plasmid, generating overhangs allowing for the in-frame directional cloning of duplexed oligos containing the desired maize genomic DNA target site into the variable targeting domain. In this example, only target sequences starting with a G nucleotide were used to promote favorable polymerase III expression of the guide RNA or crRNA.

[0487] Expression of both the Cas endonuclease gene and the guide RNA then allows for the formation of the guide RNA/Cas complex depicted in FIG. 2 B (SEQ ID NO: 8). Alternatively, expression of the Cas endonucleases gene, crRNA, and tracrRNA allow for the formation of the crRNA/tracrRNA/Cas complex as depicted in FIG. 2 A, (SEQ ID NOs: 6-7).

### Example 2

### The Guide RNA/Cas Endonuclease System Cleaves Chromosomal DNA in Maize and Introduces Mutations by Imperfect Non-Homologous End-Joining

[0488] To test whether the maize optimized guide RNA/Cas endonuclease described in example 1 could recognize, cleave, and mutate maize chromosomal DNA through imprecise non-homologous end-joining (NHEJ) repair pathways, three different genomic target sequences in 5 maize loci were targeted for cleavage (see Table 1) and examined by deep sequencing for the presence of NHEJ mutations.

TABLE 1
Maize genomic target sites targeted by a guideRNA/Cas endonuclease
system.

| | | Guide | | | | SEQ |
|---|---|---|---|---|---|---|
| | | RNA | Target Site | Maize Genomic Target Site | PAM | ID |
| Locus | Location | Used | Designation | Sequence | Sequence | NO: |
| MS26 | Chr. 1: | Long | MS26Cas-1 | GTACTCCATCCGCCCCATCGA | GGG | 13 |
| | 51.81cM | | | GTA | | |
| | | Long | MS26Cas-2 | GCACGTACGTCACCATCCCGC | CGG | 14 |
| | | Long | MS26Cas-3 | GACGTACGTGCCCTACTCGAT | GGG | 15 |
| LIG | Chr. 2: | Long | LIGCas-1 | GTACCGTACGTGCCCCGGCGG | AGG | 16 |
| | 28.45cM | Long | LIGCas-2 | GGAATTGTACCGTACGTGCCC | CGG | 17 |
| | | Long | LIGCas-3 | GCGTACGCGTACGTGTG | AGG | 18 |
| MS45 | Chr. 9: | Long | MS45Cas-1 | GCTGGCCGAGGTCGACTAC | CGG | 19 |
| | 119.15cM | Long | MS45Cas-2 | GGCCGAGGTCGACTACCGGC | CGG | 20 |
| | | Long | MS45Cas-3 | GGCGCGAGCTCGTGCTTCAC | CGG | 21 |
| ALS | Chr. 4: | Long | ALSCas-1 | GGTGCCAATCATGCGTCG | CGG | 22 |
| | 107.73cM | Long | ALSCas-2 | GGTCGCCATCACGGGAC | AGG | 23 |
| | and | Long | ALSCas-3 | GTCGCGGCACCTGTCCCGTGA | TGG | 24 |
| | Chr. 5: | | | | | |
| | 115.49cM | | | | | |
| EPSPS | Chr. 9: | Long | EPSPSCas-1 | GGAATGCTGGAACTGCAATG | CGG | 25 |
| | 69.43cM | Long | EPSPSCas-2 | GCAGCTCTTCTTGGGGAATGC | TGG | 26 |
| | | Long | EPSPSCas-3 | GCAGTAACAGCTGCTGTCAA | TGG | 27 |

MS26 = Male Sterility Gene 26,
LIG = Liguleless 1 Gene Promoter,
MS45 = Male Sterility Gene 45,
ALS = Acetolactate Synthase Gene,
EPSPS = Enolpyruvylshikimate Phosphate Synthase Gene

[0489] The maize optimized Cas9 endonuclease and long guide RNA expression cassettes containing the specific maize variable targeting domains were co-delivered to 60-90 Hi-II immature maize embryos by particle-mediated delivery (see Example 10) in the presence of BBM and WUS2 genes (see Example 11). Hi-II maize embryos transformed with either the LIG3-4 or MS26++ homing endonucleases (see Example 9) targeting the same maize genomic loci as the LIGCas or MS26Cas target sites served as a positive control and embryos transformed with only the Cas9 or guide RNA expression cassette served as negative controls. After 7 days, the 20-30 most uniformly transformed embryos from each treatment were pooled and total genomic DNA was extracted. The region surrounding the intended target site was PCR amplified with Phusion® High Fidelity PCR Master Mix (New England Biolabs, M0531L) adding on the sequences necessary for amplicon-specific barcodes and Illumnia sequencing using “tailed” primers through two rounds of PCR. The primers used in the primary PCR reaction are shown in Table 2 and the primers used in the secondary PCR reaction were AATGATACGGCGACCACCGAGATCTACACTCTTTCCCTACACG (forward, SEQ ID NO: 53) and CAAGCAGAAGACGGCATA (reverse, SEQ ID NO: 54).

TABLE 2
PCR primer sequences

| | | | SEQ |
|---|---|---|---|
| | Primer | | ID |
| Target Site | Orientation | Primary PCR Primer Sequence | NO: |
| MS26Cas-1 | Forward | CTACACTCTTTCCCTACACGACGCTCTTCCGATCTA | 28 |
| | | GGACCGGAAGCTCGCCGCGT | |
| MS26Cas-1 | Reverse | CAAGCAGAAGACGGCATACGAGCTCTTCCGATCTTC | 29 |
| | | CTGGAGGACGACGTGCTG | |
| MS26Cas-2 | Forward | CTACACTCTTTCCCTACACGACGCTCTTCCGATCTAA | 30 |
| | | GGTCCTGGAGGACGACGTGCTG | |
| MS26Cas-2 | Reverse | CAAGCAGAAGACGGCATACGAGCTCTTCCGATCTCC | 31 |
| | | GGAAGCTCGCCGCGT | |
| MS26Cas-3 | Forward | CTACACTCTTTCCCTACACGACGCTCTTCCGATCTTC | 32 |
| | | CTCCGGAAGCTCGCCGCGT | |
| MS26Cas-3 | Reverse | CAAGCAGAAGACGGCATACGAGCTCTTCCGATCTTC | 29 |
| | | CTGGAGGACGACGTGCTG | |
| MS26 | Forward | CTACACTCTTTCCCTACACGACGCTCTTCCGATCTTT | 33 |
| Meganuclease | | CCTCCTGGAGGACGACGTGCTG | |
| MS26 | Reverse | CAAGCAGAAGACGGCATACGAGCTCTTCCGATCTCC | 31 |
| Meganuclease | | GGAAGCTCGCCGCGT | |
| LIGCas-1 | Forward | CTACACTCTTTCCCTACACGACGCTCTTCCGATCTA | 34 |
| | | GGACTGTAACGATTTACGCACCTGCTG | |
| LIGCas-1 | Reverse | CAAGCAGAAGACGGCATACGAGCTCTTCCGATCTGC | 35 |
| | | AAATGAGTAGCAGCGCACGTAT | |
| LIGCas-2 | Forward | CTACACTCTTTCCCTACACGACGCTCTTCCGATCTTC | 36 |
| | | CTCTGTAACGATTTACGCACCTGCTG | |
| LIGCas-2 | Reverse | CAAGCAGAAGACGGCATACGAGCTCTTCCGATCTGC | 35 |
| | | AAATGAGTAGCAGCGCACGTAT | |
| LIGCas-3 | Forward | CTACACTCTTTCCCTACACGACGCTCTTCCGATCTAA | 37 |
| | | GGCGCAAATGAGTAGCAGCGCAC | |
| LIGCas-3 | Reverse | CAAGCAGAAGACGGCATACGAGCTCTTCCGATCTCA | 38 |
| | | CCTGCTGGGAATTGTACCGTA | |
| LIG3-4 | Forward | CTACACTCTTTCCCTACACGACGCTCTTCCGATCTC | 39 |
| Meganuclease | | CTTCGCAAATGAGTAGCAGCGCAC | |
| LIG3-4 | Reverse | CAAGCAGAAGACGGCATACGAGCTCTTCCGATCTCA | 38 |
| Meganuclease | | CCTGCTGGGAATTGTACCGTA | |
| MS45Cas-1 | Forward | CTACACTCTTTCCCTACACGACGCTCTTCCGATCTA | 40 |
| | | GGAGGACCCGTTCGGCCTCAGT | |
| MS45Cas-1 | Reverse | CAAGCAGAAGACGGCATACGAGCTCTTCCGATCTGC | 41 |
| | | CGGCTGGCATTGTCTCTG | |
| MS45Cas-2 | Forward | CTACACTCTTTCCCTACACGACGCTCTTCCGATCTTC | 42 |
| | | CTGGACCCGTTCGGCCTCAGT | |
| MS45Cas-2 | Reverse | CAAGCAGAAGACGGCATACGAGCTCTTCCGATCTGC | 41 |
| | | CGGCTGGCATTGTCTCTG | |
| MS45Cas-3 | Forward | CTACACTCTTTCCCTACACGACGCTCTTCCGATCTG | 43 |
| | | AAGGGACCCGTTCGGCCTCAGT | |
| MS45Cas-3 | Reverse | CAAGCAGAAGACGGCATACGAGCTCTTCCGATCTGC | 41 |
| | | CGGCTGGCATTGTCTCTG | |
| ALSCas-1 | Forward | CTACACTCTTTCCCTACACGACGCTCTTCCGATCTAA | 44 |
| | | GGCGACGATGGGCGTCTCCTG | |
| ALSCas-1 | Reverse | CAAGCAGAAGACGGCATACGAGCTCTTCCGATCTGC | 45 |
| | | GTCTGCATCGCCACCTC | |
| ALSCas-2 | Forward | CTACACTCTTTCCCTACACGACGCTCTTCCGATCTTT | 46 |
| | | CCCGACGATGGGCGTCTCCTG | |
| ALSCas-2 | Reverse | CAAGCAGAAGACGGCATACGAGCTCTTCCGATCTGC | 45 |
| | | GTCTGCATCGCCACCTC | |
| ALSCas-3 | Forward | CTACACTCTTTCCCTACACGACGCTCTTCCGATCTG | 47 |
| | | GAACGACGATGGGCGTCTCCTG | |
| ALSCas-3 | Reverse | CAAGCAGAAGACGGCATACGAGCTCTTCCGATCTGC | 45 |
| | | GTCTGCATCGCCACCTC | |
| EPSPSCas-1 | Forward | CTACACTCTTTCCCTACACGACGCTCTTCCGATCTG | 48 |
| | | GAAGAGGAAACATACGTTGCATTTCCA | |
| EPSPSCas-1 | Reverse | CAAGCAGAAGACGGCATACGAGCTCTTCCGATCTG | 49 |
| | | GTGGAAAGTTCCCAGTTGAGGA | |
| EPSPSCas-2 | Forward | CTACACTCTTTCCCTACACGACGCTCTTCCGATCTAA | 50 |
| | | GCGGTGGAAAGTTCCCAGTTGAGGA | |
| EPSPSCas-2 | Reverse | CAAGCAGAAGACGGCATACGAGCTCTTCCGATCTGA | 51 |
| | | GGAAACATACGTTGCATTTCCA | |
| EPSPSCas-3 | Forward | CTACACTCTTTCCCTACACGACGCTCTTCCGATCTC | 52 |
| | | CTTGAGGAAACATACGTTGCATTTCCA | |
| EPSPSCas-3 | Reverse | CAAGCAGAAGACGGCATACGAGCTCTTCCGATCTG | 49 |
| | | GTGGAAAGTTCCCAGTTGAGGA | |

[0490] The resulting PCR amplifications were purified with a Qiagen PCR purification spin column, concentration measured with a Hoechst dye-based fluorometric assay, combined in an equimolar ratio, and single read 100 nucleotide-length deep sequencing was performed on IIlumina's MiSeq Personal Sequencer with a 30-40% (v/v) spike of PhiX control v3 (Illumina, FC-110-3001) to off-set sequence bias. Only those reads with a ≧1 nucleotide indel arising within the 10 nucleotide window centered over the expected site of cleavage and not found in a similar level in the negative control were classified as NHEJ mutations. NHEJ mutant reads with the same mutation were counted and collapsed into a single read and the top 10 most prevalent mutations were visually confirmed as arising within the expected site of cleavage. The total numbers of visually confirmed NHEJ mutations were then used to calculate the % mutant reads based on the total number of reads of an appropriate length containing a perfect match to the barcode and forward primer.

[0491] The frequency of NHEJ mutations recovered by deep sequencing for the guide RNA/Cas endonuclease system targeting the three LIGCas targets (SEQ ID NOS: 16, 17, 18) compared to the LIG3-4 homing endonuclease targeting the same locus is shown in Table 3. The ten most prevalent types of NHEJ mutations recovered based on the guide RNA/Cas endonuclease system compared to the LIG3-4 homing endonuclease are shown in FIG. 3 A (corresponding to SEQ ID NOs: 55-75) and FIG. 3 B (corresponding to SEQ ID NOs: 76-96). Approximately, 12-23 fold higher frequencies of NHEJ mutations were observed when using a guide RNA/Cas system to introduce a double strand break at a maize genomic target site (Cas target sites), relative to the LIG3-4 homing endonuclease control. As shown in Table 4, a similar difference between the guide RNA/Cas system and meganuclease double-strand break technologies was observed at the MS26 locus with approximately 14-25 fold higher frequencies of NHEJ mutations when a guide RNA/Cas endonuclease system was used. High frequencies of NHEJ mutations were also recovered at the MS45, ALS and EPSPS Cas targets (see Table 5) when using a guide RNA/Cas endonuclease system. This data indicates that the guide RNA/Cas9 endonuclease system described herein can be effectively used to introduce an alteration at genomic sites of interest such as those related to male fertility, wherein an alteration results in the creation of a male sterile gene locus and male sterile plants. Altering the EPSPS target can result in the production of plants that are tolerant and/or resistant against glyphosate based herbicides. Altering the acetolactate synthase (ALS) gene target site can result in the production of plants that are tolerant and/or resistant to imidazolinone and sulphonylurea herbicides.

TABLE 3
Percent (%) mutant reads at maize Liguleless 1 target locus produced by a
guide RNA/Cas system versus a homing endonuclease system.

| | Total Number of | Number of Mutant | % Mutant |
|---|---|---|---|
| System | Reads | Reads | Reads |
| Cas9 Only Control | 640,063 | 1 | 0.00% |
| guide RNA Only | 646,774 | 1 | 0.00% |
| Control | | | |
| LIG3-4 Homing | 616,536 | 1,211 | 0.20% |
| Endonuclease | | | |
| LIGCas-1 guide/ | 716,854 | 33,050 | 4.61% |
| Cas9 | | | |
| LIGCas-2 guide/ | 711,047 | 16,675 | 2.35% |
| Cas9 | | | |
| LIGCas-3 guide/ | 713,183 | 27,959 | 3.92% |
| Cas9 | | | |

TABLE 4
Percent (%) mutant reads at maize Male Sterility 26 target locus produced
by a guide RNA/Cas system versus a homing endonuclease.

| | Total Number of | Number of Mutant | % Mutant |
|---|---|---|---|
| System | Reads | Reads | Reads |
| Cas9 Only Control | 403,123 | 15 | 0.00% |
| MS26++ Homing | 512,784 | 642 | 0.13% |
| Endonuclease | | | |
| MS26Cas-1 guide/ | 575,671 | 10,073 | 1.75% |
| Cas9 | | | |
| MS26Cas-2 guide/ | 543,856 | 16,930 | 3.11% |
| Cas9 | | | |
| MS26Cas-3 guide/ | 538,141 | 13,879 | 2.58% |
| Cas9 | | | |

TABLE 5
Percent (%) mutant reads at maize Male Sterility 45,
Acetolactate Synthase and Enolpyruvylshikimate
Phosphate Synthase target loci produced by the guide
RNA/Cas system.

| | Total Number of | Number of Mutant | % Mutant |
|---|---|---|---|
| System | Reads | Reads | Reads |
| Cas9 Only | 899,500 | 27 | 0.00% |
| Control (MS45) | | | |
| MS45Cas-1 | 812,644 | 3,795 | 0.47% |
| guide/Cas9 | | | |
| MS45Cas-2 | 785,183 | 14,704 | 1.87% |
| guide/Cas9 | | | |
| MS45Cas-3 | 728,023 | 9,203 | 1.26% |
| guide/Cas9 | | | |
| Cas9 Only | 534,764 | 19 | 0.00% |
| Control (ALS) | | | |
| ALSCas-1 | 434,452 | 9,669 | 2.23% |
| guide/Cas9 | | | |
| ALSCas-2 | 472,351 | 6,352 | 1.345% |
| guide/Cas9 | | | |
| ALSCas-3 | 497,786 | 8,535 | 1.715% |
| guide/Cas9 | | | |
| Cas9 Only | 1,347,086 | 6 | 0.00% |
| Control (EPSPS) | | | |
| EPSPSCas-1 | 1,420,274 | 13,051 | 0.92% |
| guide/Cas9 | | | |
| EPSPSCas-2 | 1,225,082 | 26,340 | 2.15% |
| guide/Cas9 | | | |
| EPSPSCas-3 | 1,406,905 | 53,603 | 3.81% |
| guide/Cas9 | | | |

[0492] Taken together, our data indicate that the maize optimized guide RNA/Cas endonuclease system described herein using a long guide RNA expression cassette efficiently cleaves maize chromosomal DNA and generates imperfect NHEJ mutations at frequencies greater than the engineered LIG3-4 and MS26++ homing endonucleases.

### Example 3

### Long Guide RNA of the Maize Optimized Guide RNA/Cas Endonuclease System Cleaves Maize Chromosomal DNA More Efficiently than the Short Guide RNA

[0493] To determine the most effective guide RNA (comprising a fusion of the crRNA and tracrRNA) for use in maize, the recovery of NHEJ mutations using a short guide RNA (SEQ ID NO: 11) based on Jinek et al. (2012) Science 337:816-21 and a long guide RNA (SEQ ID NO: 8) based on Mali et al. (2013) Science 339:823-26 was examined.

[0494] The variable targeting domains of the guide RNA targeting the maize genomic target sites at the LIG locus (LIGCas-1, LIGCas-2 and LIGCas-3, SEQ ID NOs: 16, 17 and 18, Table1) were introduced into both the maize optimized long and short guide RNA expression cassettes as described in Example 1 and co-transformed along with the maize optimized Cas9 endonuclease expression cassette into immature maize embryos and deep sequenced for NHEJ mutations as described in Example 2. Embryos transformed with only the Cas9 endonuclease expression cassette served as a negative control.

[0495] As shown in Table 6 below, the frequency of NHEJ mutations recovered with the long guide RNA far exceeded those obtained with the short guide RNA. This data indicates that the long guide RNA paired with the maize optimized Cas9 endonuclease gene described herein more efficiently cleaves maize chromosomal DNA.

TABLE 6
Percent (%) mutant reads at the maize Liguleless 1 target locus produced
by a guide RNA/Cas system with a long versus a short guide RNA.

| | | | | % |
|---|---|---|---|---|
| | guide RNA | Total Number of | Number of | Mutant |
| System | Used | Reads | Mutant Reads | Reads |
| Cas9 Only | N/A | 640,063 | 1 | 0.00% |
| LIGCas-1 | Short | 676,870 | 43 | 0.01% |
| guide/Cas9 | | | | |
| LIGCas-2 | Short | 747,945 | 91 | 0.01% |
| guide/Cas9 | | | | |
| LIGCas-3 | Short | 655,157 | 10 | 0.00% |
| guide/Cas9 | | | | |
| LIGCas-1 | Long | 716,854 | 33,050 | 4.61% |
| guide/Cas9 | | | | |
| LIGCas-2 | Long | 711,047 | 16,675 | 2.35% |
| guide/cas9 | | | | |
| LIGCas-3 | Long | 713,183 | 27,959 | 3.92% |
| guide/Cas9 | | | | |

### Example 4

### The Guide RNA/Cas Endonuclease System May be Multiplexed to Simultaneously Target Multiple Chromosomal Loci in Maize for Mutagenesis by Imperfect Non-Homologous End-Joining

[0496] To test if multiple chromosomal loci may be simultaneously mutagenized with the guide RNA/maize optimized Cas endonuclease system described herein, the long guide RNA expression cassettes targeting the MS26Cas-2 target site (SEQ ID NO: 14), the LIGCas-3 target site (SEQ ID NO: 18) and the MS45Cas-2 target site (SEQ ID NO: 20), were co-transformed into maize embryos either in duplex or in triplex along with the Cas9 endonuclease expression cassette and examined by deep sequencing for the presence of imprecise NHEJ mutations as described in Example 2.

[0497] Hi-II maize embryos co-transformed with the Cas9 expression cassette and the corresponding guide RNA expression cassette singly served as a positive control and embryos transformed with only the Cas9 expression cassette served as a negative control.

[0498] As shown in Table 7 below, mutations resulting from imprecise NHEJ were recovered at all relevant loci when multiple guide RNA expression cassettes were simultaneously introduced either in duplex or triplex with frequencies of mutant reads near those of the positive control. Thus, demonstrating that the maize optimized guide RNA/Cas endonuclease system described herein may be used to simultaneously introduce imprecise NHEJ mutations at multiple loci in maize.

TABLE 7
Percent (%) mutant reads at maize target loci produced by a
multiplexed guide RNA/Cas system.

| | guide RNAs | | | |
|---|---|---|---|---|
| Target Site | Co-transformed | Total | Number | |
| Examined for | Individually, in | Number | of | |
| NHEJ | Duplex, or in Triplex | of | Mutant | % Mutant |
| Mutations | with Cas9 | Reads | Reads | Reads |
| LIGCas-3, | None (Cas9 Only | 527,691 | 9 | 0.00% |
| MS26Cas-2, | control) | | | |
| MS45Cas-2 | | | | |
| LIGCas-3 | LIGCas-3 | 645,107 | 12,631 | 1.96% |
| | LIGCas-3 | 579,992 | 10,348 | 1.78% |
| | MS26Cas-2 | | | |
| | LIGCas-3 | 648,901 | 12,094 | 1.86% |
| | MS26Cas-2 | | | |
| | MS45Cas-2 | | | |
| MS26Cas-2 | MS26 Cas 2 | 699,154 | 17,247 | 2.47% |
| | LIGCas-3 | 717,158 | 10,256 | 1.43% |
| | MS26Cas-2 | | | |
| | MS26Cas-2 | 613,431 | 9,931 | 1.62% |
| | MS45Cas-2 | | | |
| | LIGCas-3 | 471,890 | 7,311 | 1.55% |
| | MS26Cas-2 | | | |
| | MS45Cas-2 | | | |
| MS45Cas-2 | MS45Cas-2 | 503,423 | 10,034 | 1.99% |
| | MS26Cas-2 | 480,178 | 8,008 | 1.67% |
| | MS45Cas-2 | | | |
| | LIGCas-3 | 416,711 | 7,190 | 1.73% |
| | MS26Cas-2 | | | |
| | MS45Cas-2 | | | |

### Example 5

### Guide RNA/Cas Endonuclease Mediated DNA Cleavage in Maize Chromosomal Loci can Stimulate Homologous Recombination Repair-Mediated Transgene Insertion

[0499] To test the utility of the maize optimized guide RNA/Cas system described herein to cleave maize chromosomal loci and stimulate homologous recombination (HR) repair pathways to site-specifically insert a transgene, a HR repair DNA vector (also referred to as a donor DNA) (SEQ ID NO: 97) was constructed as illustrated in FIG. 4 using standard molecular biology techniques and co-transformed with a long guide RNA expression cassette, comprising a variable targeting domain corresponding to the LIGCas-3 genomic target site, and a Cas9 endonuclease expression cassette into immature maize embryos as described in Example 2.

[0500] Maize embryos co-transformed with the HR repair DNA vector and LIG3-4 homing endonuclease (see Example 9) targeting the same genomic target site as LIGCas-3 served as a positive control. Since successful delivery of the HR repair DNA vector confers bialaphos herbicide resistance, callus events containing putative HR-mediated transgenic insertions were selected by placing the callus on herbicide containing media. After selection, stable callus events were sampled, total genomic DNA extracted, and using the primer pairs shown in FIG. 5 (corresponding to SEQ ID NOs: 98-101), PCR amplification was carried out at both possible transgene genomic DNA junctions to identify putative HR-mediated transgenic insertions. The resulting amplifications were sequenced for confirmation.

[0501] Sequence confirmed PCR amplifications indicating site-specific transgene insertion for the guide RNA/Cas system were detected for 37 out of 384 stable transformants with 15 containing amplifications across both transgene genomic DNA junctions indicating near perfect site-specific transgene insertion. The LIG3-4 homing endonuclease positive control yielded PCR amplifications indicating site-specific transgene insertion for 3 out of 192 stable transformants with 1 containing amplifications across both transgene genomic DNA junctions. The data clearly demonstrates that maize chromosomal loci cleaved with the maize optimized guide RNA/Cas system described herein can be used to stimulate HR repair pathways to site-specifically insert transgenes at frequencies greater than the LIG3-4 homing endonuclease.

### Example 6

### Guide RNA/Cas Endonuclease System Transformed Together on a Single Vector Results in Greater Recovery of Imperfect Non-Homologous End-Joining Mutations

[0502] To evaluate different delivery methods for the maize optimized guide RNA/Cas endonuclease system described herein, the recovery of NHEJ mutations when the guide RNA/Cas expression cassettes were either co-transformed as separate DNA vectors as in Examples 2, 3, 4 and 5 or transformed as a single vector DNA (comprising both guide RNA and Cas endonuclease expression cassettes, as shown in FIG. 1C) was examined.

[0503] The long guide RNA expression cassette for LIGCas-3 and the Cas9 expression cassette were consolidated onto a single vector DNA (FIG. 1 C, SEQ ID NO: 102) by standard molecular biology techniques and transformed into immature Hi-II maize embryos as described in Examples 10 and 11 by particle-mediated delivery. Hi-II embryos co-transformed with the Cas9 and LIGCas-3 long guide RNA expression cassettes served as a positive control while embryos transformed with only the Cas9 expression cassette served as a negative control. Deep sequencing for NHEJ mutations was performed as described in Example 2.

[0504] As shown in Table 8 below, the frequency of NHEJ mutations recovered when the Cas endonuclease and long guide RNA expression cassettes were delivered together as a single vector DNA was approximately 2-fold greater than that observed from the equivalent co-transformation experiment. This indicates that delivery of the guide RNA/Cas system expression cassettes together on a single vector DNA results in a greater recovery of imperfect non-homologous end-joining mutations.

TABLE 8
Percent (%) mutant reads at the maize Liguleless 1 target
locus produced by a guide RNA/Cas system with Cas9 and
guide RNA expression cassettes combined into one DNA
vector versus two separate DNA vectors.

| | Total | Number of | |
|---|---|---|---|
| | Number of | Mutant | % Mutant |
| System | Reads | Reads | Reads |
| Cas9 Only Control | 1,519,162 | 97 | 0.01% |
| LIGCas-3 | 1,515,0607 | 36,346 | 2.40% |
| guide/Cas9 (Two | | | |
| vector DNAs) | | | |
| LIGCas-3 | 1,860,031 | 105,854 | 5.69% |
| guide/Cas9 (Single | | | |
| vector DNA) | | | |

### Example 7

### Delivery Methods for Plant Genome Editing Using the Guide RNA/Cas Endonuclease System

[0505] This example describes methods to deliver or maintain and express the Cas9 endonuclease and guide RNA (or individual crRNA and tracrRNAs) into, or within plants, respectively, to enable directed DNA modification or gene insertion via homologous recombination. More specifically this example describes a variety of methods which include, but are not limited to, delivery of the Cas9 endonuclease as a DNA, RNA (5′-capped and polyadenylated) or protein molecule. In addition, the guide RNA may be delivered as a DNA or RNA molecule.

[0506] Shown in Example 2, a high mutation frequency was observed when Cas9 endonuclease and guide RNA were delivered as DNA vectors by biolistic transformation of immature corn embryos. Other embodiments of this disclosure can be to deliver the Cas9 endonuclease as a DNA, RNA or protein and the guide RNA as a DNA or RNA molecule or as a duplex crRNA/tracrRNA molecule as RNA or DNA or a combination. Various combinations of Cas9 endonuclease, guide RNA and crRNA/tracrRNA delivery methods can be, but are not limited to, the methods shown in Table 9.

TABLE 9
Various combinations of delivery of the cas9 endonuclease,
guide RNA or cRNA + tracrRNA.

| | Components delivered. |
|---|---|
| combination | (Delivery method is shown between brackets) |
| 1 | Cas9 (DNA vector), guide RNA (DNA vector) |
| 2 | Cas9 (DNA vector), guide RNA (RNA) |
| 3 | Cas9 (RNA), guide RNA (DNA) |
| 4 | Cas9 (RNA), guide RNA (RNA) |
| 5 | Cas9 (Protein), guide RNA (DNA) |
| 6 | Cas9 (Protein), guide RNA (RNA) |
| 7 | Cas9 (DNA vector), crRNA (DNA), tracrRNA (DNA) |
| 8 | Cas9 (DNA vector), crRNA (RNA), tracrRNA (DNA) |
| 9 | Cas9 (DNA vector), crRNA (RNA), tracrRNA (RNA) |
| 10 | Cas9 (DNA vector) crRNA (DNA), tracrRNA (RNA) |
| 11 | Cas9 (RNA), crRNA (DNA), tracrRNA (DNA) |
| 12 | Cas9 (RNA), crRNA (RNA), tracrRNA (DNA) |
| 13 | Cas9 (RNA), crRNA (RNA), tracrRNA (RNA) |
| 14 | Cas9 (RNA), crRNA (DNA), tracrRNA (RNA) |
| 15 | Cas9 (Protein), crRNA (DNA), tracrRNA (DNA) |
| 16 | Cas9 (Protein), crRNA (RNA), tracrRNA (DNA) |
| 17 | Cas9 (Protein), crRNA (RNA), tracrRNA 18 (RNA) |
| 18 | Cas9 (Protein), crRNA (DNA), tracrRNA (RNA) |

[0507] Delivery of the Cas9 (as DNA vector) and guide RNA (as DNA vector) example (Table 9, combination1) can also be accomplished by co-delivering these DNA cassettes on a single or multiple Agrobacterium vectors and transforming plant tissues by Agrobacterium mediated transformation. In addition, a vector containing a constitutive, tissue-specific or conditionally regulated Cas9 gene can be first delivered to plant cells to allow for stable integration into the plant genome to establish a plant line that contains only the Cas9 gene in the plant genome. In this example, single or multiple guide RNAs, or single or multiple crRNA and a tracrRNA can be delivered as either DNA or RNA, or combination, to the plant line containing the genome-integrated version of the Cas9 gene for the purpose of generating mutations or promoting homologous recombination when HR repair DNA vectors for targeted integration are co-delivered with the guide RNAs. As extension of this example, plant line containing the genome-integrated version of the Cas9 gene and a tracrRNA as a DNA molecule can also be established. In this example single or multiple crRNA molecules can be delivered as RNA or DNA to promote the generation of mutations or to promote homologous recombination when HR repair DNA vectors for targeted integration are co-delivered with crRNA molecule(s) enabling the targeted mutagenesis or homologous recombination at single or multiple sites in the plant genome.

### Example 8

### Components of the Guide RNA/Cas Endonuclease System Delivered Directly as RNA in Plants

[0508] This example illustrates the use of the methods as described in Table 9 configuration of Example 7 [Cas9 (DNA vector), guide RNA (RNA)] for modification or mutagenesis of chromosomal loci in plants. The maize optimized Cas9 endonuclease expression cassette described in Example 1 was co-delivered by particle gun as described in Example 2 along with single stranded RNA molecules (synthesized by Integrated DNA Technologies, Inc.) constituting a short guide RNA targeting the maize locus and sequence shown in Table 10. Embryos transformed with only the Cas9 expression cassette or short guide RNA molecules served as negative controls. Seven days post-bombardment, the immature embryos were harvested and analyzed by deep sequencing for NHEJ mutations as described in Example 2. Mutations not present in the negative controls were found at the site (FIG. 6, corresponding to SEQ ID NOs: 104-110). These mutations were similar to those found in Examples 2, 3, 4 and 6. This data indicates that component(s) of the maize optimized guide RNA/Cas endonuclease system described herein may be delivered directly as RNA.

TABLE 10
Maize genomic target site and location
for short guide RNA delivered as RNA.

| | | Guide | | | | SEQ |
|---|---|---|---|---|---|---|
| | | RNA | | | PAM | ID |
| Locus | Location | Used | Designation | Maize Target Site | Sequence | NO |
| 55 | Chr. 1: | Short | 55CasRNA-1 | TGGGCAGGTCTCACGACGGT | TGG | 103 |
| | 51.78 | | | | | |
| | cM | | | | | |

### Example 9

### Creation of Rare Cutting Engineered Meganucleases

### LIG3-4 Meganuclease and LIG3-4 Intended Recognition Sequence

[0509] An endogenous maize genomic target site comprising the LIG3-4 intended recognition sequence (SEQ ID NO: 111) was selected for design of a rare-cutting double-strand break inducing agent (SEQ ID NO: 112) as described in US patent publication 2009-0133152 A1 (published May 21, 2009). The LIG3-4 intended recognition sequence is a 22 bp polynucleotide having the following sequence: ATATACCTCACACGTACGCGTA (SEQ ID NO: 111).

### MS 26++Meganuclease

[0510] An endogenous maize genomic target site designated “TS-MS26” (SEQ ID NO: 113) was selected for design of a custom double-strand break inducing agent MS26++ as described in U.S. patent application Ser. No. 13/526,912 filed Jun. 19, 2012). The TS-MS26 target site is a 22 bp polynucleotide positioned 62 bps from the 5′ end of the fifth exon of the maize MS26 gene and having the following sequence: gatggtgacqtaĉgtgccctac (SEQ ID NO: 113). The double strand break site and overhang region is underlined, the enzyme cuts after C13, as indicated by the A. Plant optimized nucleotide sequences for an engineered endonuclease (SEQ ID NO: 114) encoding an engineered MS26++ endonuclease were designed to bind and make double-strand breaks at the selected TS-MS26 target site.

### Example 10

### Transformation of Maize Immature Embryos

[0511] Transformation can be accomplished by various methods known to be effective in plants, including particle-mediated delivery, Agrobacterium-mediated transformation, PEG-mediated delivery, and electroporation.

[0512] a. Particle-Mediated Delivery

[0513] Transformation of maize immature embryos using particle delivery is performed as follows. Media recipes follow below.

[0514] The ears are husked and surface sterilized in 30% Clorox bleach plus 0.5% Micro detergent for 20 minutes, and rinsed two times with sterile water. The immature embryos are isolated and placed embryo axis side down (scutellum side up), 25 embryos per plate, on 560Y medium for 4 hours and then aligned within the 2.5-cm target zone in preparation for bombardment. Alternatively, isolated embryos are placed on 560L (Initiation medium) and placed in the dark at temperatures ranging from 26° C. to 37° C. for 8 to 24 hours prior to placing on 560Y for 4 hours at 26° C. prior to bombardment as described above.

[0515] Plasmids containing the double strand brake inducing agent and donor DNA are constructed using standard molecular biology techniques and co-bombarded with plasmids containing the developmental genes ODP2 (AP2 domain transcription factor ODP2 (Ovule development protein 2); US20090328252 A1) and Wushel (US2011/0167516).

[0516] The plasmids and DNA of interest are precipitated onto 0.6 μm (average diameter) gold pellets using a water-soluble cationic lipid transfection reagent as follows. DNA solution is prepared on ice using 1 pg of plasmid DNA and optionally other constructs for co-bombardment such as 50 ng (0.5 μl) of each plasmid containing the developmental genes ODP2 (AP2 domain transcription factor ODP2 (Ovule development protein 2); US20090328252 A1) and Wushel. To the pre-mixed DNA, 20 μl of prepared gold particles (15 mg/ml) and 5 μl of the a water-soluble cationic lipid transfection reagent is added in water and mixed carefully. Gold particles are pelleted in a microfuge at 10,000 rpm for 1 min and supernatant is removed. The resulting pellet is carefully rinsed with 100 ml of 100% EtOH without resuspending the pellet and the EtOH rinse is carefully removed. 105 μl of 100% EtOH is added and the particles are resuspended by brief sonication. Then, 10 μl is spotted onto the center of each macrocarrier and allowed to dry about 2 minutes before bombardment.

[0517] Alternatively, the plasmids and DNA of interest are precipitated onto 1.1 μm (average diameter) tungsten pellets using a calcium chloride (CaCl₂) precipitation procedure by mixing 100 μl prepared tungsten particles in water, 10 μl (1 pg) DNA in Tris EDTA buffer (1 pg total DNA), 100 μl 2.5 M CaCl2, and 10 μl 0.1 M spermidine. Each reagent is added sequentially to the tungsten particle suspension, with mixing. The final mixture is sonicated briefly and allowed to incubate under constant vortexing for 10 minutes. After the precipitation period, the tubes are centrifuged briefly, liquid is removed, and the particles are washed with 500 ml 100% ethanol, followed by a 30 second centrifugation. Again, the liquid is removed, and 105 μl 100% ethanol is added to the final tungsten particle pellet. For particle gun bombardment, the tungsten/DNA particles are briefly sonicated. 10 μl of the tungsten/DNA particles is spotted onto the center of each macrocarrier, after which the spotted particles are allowed to dry about 2 minutes before bombardment.

[0518] The sample plates are bombarded at level #4 with a Biorad Helium Gun. All samples receive a single shot at 450 PSI, with a total of ten aliquots taken from each tube of prepared particles/DNA.

[0519] Following bombardment, the embryos are incubated on 560P (maintenance medium) for 12 to 48 hours at temperatures ranging from 26 C to 37 C, and then placed at 26 C. After 5 to 7 days the embryos are transferred to 560R selection medium containing 3 mg/liter Bialaphos, and subcultured every 2 weeks at 26 C. After approximately 10 weeks of selection, selection-resistant callus clones are transferred to 288J medium to initiate plant regeneration. Following somatic embryo maturation (2-4 weeks), well-developed somatic embryos are transferred to medium for germination and transferred to a lighted culture room. Approximately 7-10 days later, developing plantlets are transferred to 272V hormone-free medium in tubes for 7-10 days until plantlets are well established. Plants are then transferred to inserts in flats (equivalent to a 2.5″ pot) containing potting soil and grown for 1 week in a growth chamber, subsequently grown an additional 1-2 weeks in the greenhouse, then transferred to Classic 600 pots (1.6 gallon) and grown to maturity. Plants are monitored and scored for transformation efficiency, and/or modification of regenerative capabilities.

[0520] Initiation medium (560L) comprises 4.0 g/l N6 basal salts (SIGMA C-1416), 1.0 ml/l Eriksson's Vitamin Mix (1000×SIGMA-1511), 0.5 mg/l thiamine HCl, 20.0 g/l sucrose, 1.0 mg/l 2,4-D, and 2.88 g/l L-proline (brought to volume with D-I H₂O following adjustment to pH 5.8 with KOH); 2.0 g/l Gelrite (added after bringing to volume with D-I H2O); and 8.5 mg/l silver nitrate (added after sterilizing the medium and cooling to room temperature).

[0521] Maintenance medium (560P) comprises 4.0 g/l N6 basal salts (SIGMA C-1416), 1.0 ml/l Eriksson's Vitamin Mix (1000×SIGMA-1511), 0.5 mg/l thiamine HCl, 30.0 g/l sucrose, 2.0 mg/l 2,4-D, and 0.69 g/l L-proline (brought to volume with D-I H₂O following adjustment to pH 5.8 with KOH); 3.0 g/l Gelrite (added after bringing to volume with D-I H2O); and 0.85 mg/l silver nitrate (added after sterilizing the medium and cooling to room temperature).

[0522] Bombardment medium (560Y) comprises 4.0 g/l N6 basal salts (SIGMA C-1416), 1.0 ml/l Eriksson's Vitamin Mix (1000×SIGMA-1511), 0.5 mg/l thiamine HCl, 120.0 g/l sucrose, 1.0 mg/l 2,4-D, and 2.88 g/l L-proline (brought to volume with D-I H₂O following adjustment to pH 5.8 with KOH); 2.0 g/l Gelrite (added after bringing to volume with D-I H2O); and 8.5 mg/l silver nitrate (added after sterilizing the medium and cooling to room temperature).

Selection medium (560R) comprises 4.0 g/l N6 basal salts (SIGMA C-1416), 1.0 ml/l Eriksson's Vitamin Mix (1000×SIGMA-1511), 0.5 mg/l thiamine HCl, 30.0 g/l sucrose, and 2.0 mg/l 2,4-D (brought to volume with D-I H₂O following adjustment to pH 5.8 with KOH); 3.0 g/l Gelrite (added after bringing to volume with D-I H2O); and 0.85 mg/l silver nitrate and 3.0 mg/l bialaphos (both added after sterilizing the medium and cooling to room temperature).

[0523] Plant regeneration medium (288J) comprises 4.3 g/l MS salts (GIBCO 11117-074), 5.0 ml/l MS vitamins stock solution (0.100 g nicotinic acid, 0.02 g/l thiamine HCL, 0.10 g/l pyridoxine HCL, and 0.40 g/l glycine brought to volume with polished D-I H₂O) (Murashige and Skoog (1962) Physiol. Plant. 15:473), 100 mg/l myo-inositol, 0.5 mg/l zeatin, 60 g/l sucrose, and 1.0 ml/l of 0.1 mM abscisic acid (brought to volume with polished D-I H₂O after adjusting to pH 5.6); 3.0 g/l Gelrite (added after bringing to volume with D-I H2O); and 1.0 mg/l indoleacetic acid and 3.0 mg/l bialaphos (added after sterilizing the medium and cooling to 60° C.). Hormone-free medium (272V) comprises 4.3 g/l MS salts (GIBCO 11117-074), 5.0 ml/l MS vitamins stock solution (0.100 g/l nicotinic acid, 0.02 g/l thiamine HCL, 0.10 g/l pyridoxine HCL, and 0.40 g/l glycine brought to volume with polished D-I H2O), 0.1 g/l myo-inositol, and 40.0 g/l sucrose (brought to volume with polished D-I H₂O after adjusting pH to 5.6); and 6 g/l bacto-agar (added after bringing to volume with polished D-I H2O), sterilized and cooled to 60° C.

[0524] b. Agrobacterium-Mediated Transformation

[0525] Agrobacterium-mediated transformation was performed essentially as described in Djukanovic et al. (2006) Plant Biotech J 4:345-57. Briefly, 10-12 day old immature embryos (0.8-2.5 mm in size) were dissected from sterilized kernels and placed into liquid medium (4.0 g/L N6 Basal Salts (Sigma C-1416), 1.0 ml/L Eriksson's Vitamin Mix (Sigma E-1511), 1.0 mg/L thiamine HCl, 1.5 mg/L 2, 4-D, 0.690 g/L L-proline, 68.5 g/L sucrose, 36.0 g/L glucose, pH 5.2). After embryo collection, the medium was replaced with 1 ml Agrobacterium at a concentration of 0.35-0.45 OD550. Maize embryos were incubated with Agrobacterium for 5 min at room temperature, then the mixture was poured onto a media plate containing 4.0 g/L N6 Basal Salts (Sigma C-1416), 1.0 ml/L Eriksson's Vitamin Mix (Sigma E-1511), 1.0 mg/L thiamine HCl, 1.5 mg/L 2, 4-D, 0.690 g/L L-proline, 30.0 g/L sucrose, 0.85 mg/L silver nitrate, 0.1 nM acetosyringone, and 3.0 g/L Gelrite, pH 5.8. Embryos were incubated axis down, in the dark for 3 days at 20° C., then incubated 4 days in the dark at 28° C., then transferred onto new media plates containing 4.0 g/L N6 Basal Salts (Sigma C-1416), 1.0 ml/L Eriksson's Vitamin Mix (Sigma E-1511), 1.0 mg/L thiamine HCl, 1.5 mg/L 2, 4-D, 0.69 g/L L-proline, 30.0 g/L sucrose, 0.5 g/L MES buffer, 0.85 mg/L silver nitrate, 3.0 mg/L Bialaphos, 100 mg/L carbenicillin, and 6.0 g/L agar, pH 5.8. Embryos were subcultured every three weeks until transgenic events were identified. Somatic embryogenesis was induced by transferring a small amount of tissue onto regeneration medium (4.3 g/L MS salts (Gibco 11117), 5.0 ml/L MS Vitamins Stock Solution, 100 mg/L myo-inositol, 0.1 μM ABA, 1 mg/L IAA, 0.5 mg/L zeatin, 60.0 g/L sucrose, 1.5 mg/L Bialaphos, 100 mg/L carbenicillin, 3.0 g/L Gelrite, pH 5.6) and incubation in the dark for two weeks at 28° C. All material with visible shoots and roots were transferred onto media containing 4.3 g/L MS salts (Gibco 11117), 5.0 ml/L MS Vitamins Stock Solution, 100 mg/L myo-inositol, 40.0 g/L sucrose, 1.5 g/L Gelrite, pH 5.6, and incubated under artificial light at 28° C. One week later, plantlets were moved into glass tubes containing the same medium and grown until they were sampled and/or transplanted into soil.

### Example 11

### Transient Expression of BBM Enhances Transformation

[0526] Parameters of the transformation protocol can be modified to ensure that the BBM activity is transient. One such method involves precipitating the BBM-containing plasmid in a manner that allows for transcription and expression, but precludes subsequent release of the DNA, for example, by using the chemical PEI. In one example, the BBM plasmid is precipitated onto gold particles with PEI, while the transgenic expression cassette (UBI::moPAT˜GFPm::PinII; moPAT is the maize optimized PAT gene) to be integrated is precipitated onto gold particles using the standard calcium chloride method.

[0527] Briefly, gold particles were coated with PEI as follows. First, the gold particles were washed. Thirty-five mg of gold particles, 1.0 in average diameter (A.S.I. #162-0010), were weighed out in a microcentrifuge tube, and 1.2 ml absolute EtOH was added and vortexed for one minute. The tube was incubated for 15 minutes at room temperature and then centrifuged at high speed using a microfuge for 15 minutes at 4° C. The supernatant was discarded and a fresh 1.2 ml aliquot of ethanol (EtOH) was added, vortexed for one minute, centrifuged for one minute, and the supernatant again discarded (this is repeated twice). A fresh 1.2 ml aliquot of EtOH was added, and this suspension (gold particles in EtOH) was stored at −20° C. for weeks. To coat particles with polyethylimine (PEI; Sigma #P3143), 250 μl of the washed gold particle/EtOH mix was centrifuged and the EtOH discarded. The particles were washed once in 100 μl ddH2O to remove residual ethanol, 250 μl of 0.25 mM PEI was added, followed by a pulse-sonication to suspend the particles and then the tube was plunged into a dry ice/EtOH bath to flash-freeze the suspension, which was then lyophilized overnight. At this point, dry, coated particles could be stored at −80° C. for at least 3 weeks. Before use, the particles were rinsed 3 times with 250 μl aliquots of 2.5 mM HEPES buffer, pH 7.1, with 1× pulse-sonication, and then a quick vortex before each centrifugation. The particles were then suspended in a final volume of 250 μl HEPES buffer. A 25 μl aliquot of the particles was added to fresh tubes before attaching DNA. To attach uncoated DNA, the particles were pulse-sonicated, then 1 pg of DNA (in 5 μl water) was added, followed by mixing by pipetting up and down a few times with a Pipetteman and incubated for 10 minutes. The particles were spun briefly (i.e. 10 seconds), the supernatant removed, and 60 μl EtOH added. The particles with PEI-precipitated DNA-1 were washed twice in 60 μl of EtOH. The particles were centrifuged, the supernatant discarded, and the particles were resuspended in 45 μl water. To attach the second DNA (DNA-2), precipitation using a water-soluble cationic lipid transfection reagent was used. The 45 μl of particles/DNA-1 suspension was briefly sonicated, and then 5 μl of 100 ng/μl of DNA-2 and 2.5 μl of a water-soluble cationic lipid transfection reagent were added. The solution was placed on a rotary shaker for 10 minutes, centrifuged at 10,000g for 1 minute. The supernatant was removed, and the particles resuspended in 60 μl of EtOH. The solution was spotted onto macrocarriers and the gold particles onto which DNA-1 and DNA-2 had been sequentially attached were delivered into scutellar cells of 10 DAP Hi-II immature embryos using a standard protocol for the PDS-1000. For this experiment, the DNA-1 plasmid contained a UBI::RFP::pinII expression cassette, and DNA-2 contained a UBI::CFP::pinII expression cassette. Two days after bombardment, transient expression of both the CFP and RFP fluorescent markers was observed as numerous red & blue cells on the surface of the immature embryo. The embryos were then placed on non-selective culture medium and allowed to grow for 3 weeks before scoring for stable colonies. After this 3-week period, 10 multicellular, stably-expressing blue colonies were observed, in comparison to only one red colony. This demonstrated that PEI-precipitation could be used to effectively introduce DNA for transient expression while dramatically reducing integration of the PEI-introduced DNA and thus reducing the recovery of RFP-expressing transgenic events. In this manner, PEI-precipitation can be used to deliver transient expression of BBM and/or WUS2.

[0528] For example, the particles are first coated with UBI::BBM::pinII using PEI, then coated with UBI::moPAT-YFP using a water-soluble cationic lipid transfection reagent, and then bombarded into scutellar cells on the surface of immature embryos. PEI-mediated precipitation results in a high frequency of transiently expressing cells on the surface of the immature embryo and extremely low frequencies of recovery of stable transformants. Thus, it is expected that the PEI-precipitated BBM cassette expresses transiently and stimulates a burst of embryogenic growth on the bombarded surface of the tissue (i.e. the scutellar surface), but this plasmid will not integrate. The PAT˜GFP plasmid released from the Ca++/gold particles is expected to integrate and express the selectable marker at a frequency that results in substantially improved recovery of transgenic events. As a control treatment, PEI-precipitated particles containing a UBI::GUS::pinII (instead of BBM) are mixed with the PAT˜GFP/Ca++ particles. Immature embryos from both treatments are moved onto culture medium containing 3 mg/l bialaphos. After 6-8 weeks, it is expected that GFP+, bialaphos-resistant calli will be observed in the PEI/BBM treatment at a much higher frequency relative to the control treatment (PEI/GUS).

[0529] As an alternative method, the BBM plasmid is precipitated onto gold particles with PEI, and then introduced into scutellar cells on the surface of immature embryos, and subsequent transient expression of the BBM gene elicits a rapid proliferation of embryogenic growth. During this period of induced growth, the explants are treated with Agrobacterium using standard methods for maize (see Example 1), with T-DNA delivery into the cell introducing a transgenic expression cassette such as UBI::moPAT˜GFPm::pinII. After co-cultivation, explants are allowed to recover on normal culture medium, and then are moved onto culture medium containing 3 mg/l bialaphos. After 6-8 weeks, it is expected that GFP+, bialaphos-resistant calli will be observed in the PEI/BBM treatment at a much higher frequency relative to the control treatment (PEI/GUS).

[0530] It may be desirable to “kick start” callus growth by transiently expressing the BBM and/or WUS2 polynucleotide products. This can be done by delivering BBM and WUS2 5′-capped polyadenylated RNA, expression cassettes containing BBM and WUS2 DNA, or BBM and/or WUS2 proteins. All of these molecules can be delivered using a biolistics particle gun. For example 5′-capped polyadenylated BBM and/or WUS2 RNA can easily be made in vitro using Ambion's mMessage mMachine kit. RNA is co-delivered along with DNA containing a polynucleotide of interest and a marker used for selection/screening such as Ubi::moPAT˜GFPm::PinII. It is expected that the cells receiving the RNA will immediately begin dividing more rapidly and a large portion of these will have integrated the agronomic gene. These events can further be validated as being transgenic clonal colonies because they will also express the PAT˜GFP fusion protein (and thus will display green fluorescence under appropriate illumination). Plants regenerated from these embryos can then be screened for the presence of the polynucleotide of interest.

### Example 12

### DNA Constructs to Test the Guide RNA/Cas Endonuclease System for Soybean Genome Modifications

[0531] To test if a guide RNA/Cas endonuclease system, similar to that described in Example 1 for maize, is functional in a dicot such as soybean, a Cas9 (SO) gene (SEQ ID NO:115) soybean codon optimized from Streptococcus pyogenes M1 GAS (SF370) was expressed with a strong soybean constitutive promoter GM-EF1A2 (US patent application 20090133159 (SEQ ID NO: 116). A simian vacuolating virus 40 (SV40) large T-antigen nuclear localization signal (SEQ ID NO:117), representing the amino acid molecules of PKKKRKV (with a linker SRAD (SRADPKKKRKV), was added to the carboxyl terminus of the codon optimized Cas9 to facilitate transporting the codon optimized Cas9 protein (SEQ ID NO:118) to the nucleus. The codon optimized Cas9 gene was synthesized as two pieces by GenScript USA Inc. (Piscataway, N.J.) and cloned in frame downstream of the GM-EF1A2 promoter to make DNA construct QC782 shown in FIG. 7 (SEQ ID NO:119).

[0532] Plant U6 RNA polymerase III promoters have been cloned and characterized from such as Arabidopsis and Medicago truncatula (Waibel and Filipowicz, NAR 18:3451-3458 (1990); Li et al., J. Integrat. Plant Biol. 49:222-229 (2007); Kim and Nam, Plant Mol. Biol. Rep. 31:581-593 (2013); Wang et al., RNA 14:903-913 (2008)). Soybean U6 small nuclear RNA (snRNA) genes were identified herein by searching public soybean variety Williams82 genomic sequence using Arabidopsis U6 gene coding sequence. Approximately 0.5 kb genomic DNA sequence upstream of the first G nucleotide of a U6 gene was selected to be used as a RNA polymerase III promoter for example, GM-U6-13.1 promoter (SEQ ID NO:120), to express guide RNA to direct Cas9 nuclease to designated genomic site. The guide RNA coding sequence was 76 bp long (FIG. 8B) and comprised a 20 bp variable targeting domain from a chosen soybean genomic target site on the 5′ end and a tract of 4 or more T residues as a transcription terminator on the 3′ end. (SEQ ID NO:121, FIG. 8 B). The first nucleotide of the 20 bp variable targeting domain was a G residue to be used by RNA polymerase III for transcription. The U6 gene promoter and the complete guide RNA was synthesized and then cloned into an appropriate vector to make, for example, DNA construct QC783 shown in FIG. 8 A (SEQ ID NO:122). Other soybean U6 homologous genes promoters were similarly cloned and used for small RNA expression.

[0533] Since the Cas9 endonuclease and the guide RNA need to form a protein/RNA complex to mediate site-specific DNA double strand cleavage, the Cas9 endonuclease and guide RNA must be expressed in same cells. To improve their co-expression and presence, the Cas9 endonuclease and guide RNA expression cassettes were linked into a single DNA construct, for example, QC815 in FIG. 9 A (SEQ ID NO:123), which was then used to transform soybean cells to test the soybean optimized guide RNA/Cas system for genome modification. Similar DNA constructs were made to target different genomic sites using guide RNAs containing different target sequences.

### Example 13

### Selection of Soybean Genomic Sites to be Cleaved by the Guide RNA/Cas Endonuclease System

[0534] A region of the soybean chromosome 4 (Gm04) was selected to test if the soybean optimized guide RNA/Cas endonuclease system could recognize, cleave, and mutate soybean chromosomal DNA through imprecise non-homologous end-joining (NHEJ) repair. Two genomic target sites were selected one close to a predicted gene Glyma04g39780.1 at 114.13 cM herein named DD20 locus (FIG. 10A) and another close to Glyma04g39550.1 at 111.95 cM herein named DD43 locus (FIG. 10B). Each of the 20 bp variable targeting domain of the guide RNA started with a G residue required by RNA polymerase III and was followed in the soybean genome by a 3 bp PAM motif (Table 11). The chromosome positions of the soybean genomic targets sites in close proximity to the PAM sequences were determined by blast searching the public soybean variety Williams82 genomic sequence. The soybean genomic target sites DD20CR1(SEQ ID NO: 125), DD20CR2 (SEQ ID NO: 126), and DD43CR1 (SEQ ID NO: 127) were identified as all unique in soybean genome while a second identical 23 bp genomic target site DD43CR2 (SEQ ID NO: 128) was found at Gm06:12072339-12072361 so there are two potential cleavage sites targeted by DD43CR2 guide RNA. Both DD43CR1 and DD43CR2 are complementary strand sequences indicated by “c” after the positions.

TABLE 11
Soybean genomic target sites for a
guide RNA/Cas endonuclease system.

| Chromosome | Positions | Designation | Genomic Target Sites | PAM |
|---|---|---|---|---|
| Gm04, | 45936311-45936333 | DD20CR1 | GGAACTGACACACGACATGA | TGG |
| 114.13 cM | 45936324-45936346 | DD20CR2 | GACATGATGGAACGTGACTA | AGG |
| Gm04, | 45731921-45731943c | DD43CR1 | GTCCCTTGTACTTGTACGTA | CGG |
| 111.95 cM | 45731895-45731917c | DD43CR2 | GTATTCTAGAAAAGAGGAAT | TGG |

[0535] Guide RNA expression cassette comprising a variable targeting domain targeting one of DD20CR1, DD20CR2, DD43CR2 genomic target sites were similarly constructed and linked to the soybean Cas9 expression cassette to make DNA constructs QC817, QC818, and QC816 that are similar to QC815 in FIG. 9 A (SEQ ID NO:123) except for the 20 bp variable targeting domain of the guide RNA

[0536] Since up to six continuous mismatches in the 5′ regions of the genomic target site (protospacer) with the 20 bp variable targeting domain can be tolerated, i.e., a continuous stretch of 14 base pairs between the variable targeting domain and the crRNA sequence proximate to the PAM is necessarily enough for efficient targets cleavage any 23 bp genomic DNA sequence following the pattern N(20)NGG can be selected as a target site for the guide RNA/Cas endonuclease system. The last NGG is the PAM sequence that should not be included in the 20 bp variable targeting domain of the guide RNA. If the first N is not endogenously a G residue it must be replaced with a G residue in guide RNA target sequence to accommodate RNA polymerase III, which should not sacrifice recognition specificity of the target site by the guide RNA.

### Example 14

### Delivery of the Guide RNA/Cas Endonuclease System DNA to Soybean by Transient Transformation

[0537] The soybean optimized Cas9 endonuclease and guide RNA expression cassettes were delivered to young soybean somatic embryos in the form of embryogenic suspension cultures by particle gun bombardment. Soybean embryogenic suspension cultures were induced as follows. Cotyledons (˜3 mm in length) were dissected from surface sterilized, immature seeds and were cultured for 6-10 weeks in the light at 26° C. on a Murashige and Skoog (MS) media containing 0.7% agar and supplemented with 10 mg/ml 2,4-D (2,4-Dichlorophenoxyacetic acid). Globular stage somatic embryos, which produced secondary embryos, were then excised and placed into flasks containing liquid MS medium supplemented with 2,4-D (10 mg/ml) and cultured in the light on a rotary shaker. After repeated selection for clusters of somatic embryos that multiplied as early, globular staged embryos, the soybean embryogenic suspension cultures were maintained in 35 ml liquid media on a rotary shaker, 150 rpm, at 26° C. with fluorescent lights on a 16:8 hour day/night schedule. Cultures were subcultured every two weeks by inoculating approximately 35 mg of tissue into 35 ml of the same fresh liquid MS medium.

[0538] Soybean embryogenic suspension cultures were then transformed by the method of particle gun bombardment using a DuPont Biolistic™ PDS1000/HE instrument (Bio-Rad Laboratories, Hercules, Calif.). To 50 μl of a 60 mg/ml 1.0 mm gold particle suspension were added (in order): 30 μl of 30 ng/μl QC815 DNA fragment U6-13.1:DD43CR1+EF1A2:CAS9 as an example, 20 μl of 0.1 M spermidine, and 25 μl of 5 M CaCl₂. The particle preparation was then agitated for 3 minutes, spun in a centrifuge for 10 seconds and the supernatant removed. The DNA-coated particles were then washed once in 400 μl 100% ethanol and resuspended in 45 μl of 100% ethanol. The DNA/particle suspension was sonicated three times for one second each. Then 5 μl of the DNA-coated gold particles was loaded on each macro carrier disk.

[0539] Approximately 100 mg of a two-week-old suspension cultures were placed in an empty 60×15 mm Petri dish and the residual liquid removed from the tissue with a pipette. Membrane rupture pressure was set at 1100 psi and the chamber was evacuated to a vacuum of 28 inches mercury. The tissue was placed approximately 3.5 inches away from the retaining screen and bombarded once. The tissue clumps were rearranged and bombarded another time. Minimum amount of liquid MS media without 2,4-D supplement was added to the tissue to prevent the cultures from drying or overgrowing. The 60×15 mm Petri dish was sealed in a 100×25 mm Petri dish containing agar solid MS media to as another measure to keep the tissues from drying up. The tissues were harvested seven days after and genomic DNA was extracted for PCR analysis.

### Example 15

### Analysis of Guide RNA/Cas Endonuclease System Mediated Site-Specific NHEJ by Deep Sequencing

[0540] To evaluate DNA double strand cleavage at a soybean genomic target site mediated by the guide RNA/Cas endonuclease system, a region of approximately 100 bp genomic DNA surrounding the target site was amplified by PCR and the PCR product was then sequenced to check mutations at the target site as results of NHEJs. The region was first amplified by 20 cycles of PCR with Phusion High Fidelity mastermix (New England Biolabs) from 100 ng genomic DNA using gene-specific primers that also contain adaptors and amplicon-specific barcode sequences needed for a second round PCR and subsequence sequence analysis. For examples, the first PCR for the four experiments listed in Table 2 were done using primers DD20-S3 (SEQ ID NO:133)/DD20-A (SEQ ID NO:134), DD20-54 (SEQ ID NO:135)/DD20-A, DD43-S3 (SEQ ID NO:136)/DD43-A (SEQ ID NO:137) and DD43-S4 (SEQ ID NO:138)/DD43-A. One micro liter of the first round PCR products was further amplified by another 20 cycles of PCR using universal primers (SEQ ID NOs:140, 141) with Phusion High Fidelity mastermix. The resulting PCR products were separated on 1.5% agarose gel and the specific DNA bands were purified with Qiagen gel purification spin columns. DNA concentrations were measured with a DNA Bioanalyzer (Agilent) and equal molar amounts of DNA for up to 12 different samples each with specific barcode were mixed as one sample for Illumina deep sequencing analysis. Single read 100 nucleotide-length deep sequencing was performed at a DuPont core facility on a Illumnia's MiSeq Personal Sequencer with a 40% (v/v) spike of PhiX control v3 (Illumina, FC-110-3001) to off-set sequence bias.

[0541] Since the genomic target site is located in the middle of the −100 bp long PCR amplicon (SEQ ID NOs: 142, 143, 144, 145), the 100 nucleotide-length deep sequencing is sufficient to cover the targets site region. A window of 10 nucleotides centered over the expected cleavage site, i.e., 3 bp upstream of the PAM, was selected for sequence analysis. Only those reads with one or more nucleotide indel arising within the 10 nucleotide window and not found in a similar level in negative controls were classified as NHEJ mutations. NHEJ mutant reads of different lengths but with the same mutation were counted into a single read and up to 10 most prevalent mutations were visually confirmed to be specific mutations before they were then used to calculate the % mutant reads based on the total analyzed reads containing specific barcode and forward primer.

[0542] The frequencies of NHEJ mutations revealed by deep sequencing for four target sites DD20CR1, DD20CR2, DD43CR1, DD43CR2 with one RNA polymerase III promoter GM-U6-13.1 are shown in Table 2. The visually confirmed most prevalent NHEJ mutations are shown in FIG. 11A-11D. The mutant sequences in FIG. 11A-11E are listed as SEQ ID NOs:147-201. The top row is the original reference sequence with the target site sequence underlined. Deletions in the mutated sequences are indicated by “---” while additions and replacements are indicated by bold letters. Total count of each mutation of different reads is given in the last column. Cas9 nuclease construct only, guide RNA construct only, and no DNA bombardment negative controls were similarly performed and analyzed but data not shown since no-specific mutations were detected. Other targets sites and guide RNAs were also tested with similar positive results and data not shown.

TABLE 12
Target site-specific mutations introduced by guide RNA/Cas
endonuclease mediated NHEJ.

| | | Mutant | Total | % |
|---|---|---|---|---|
| Experiment | DNA | reads | reads | Mutants |
| U6- | QC817 | 339 | 710,339 | 0.048% |
| 13.1:DD20CR1 + EF1A2:CAS9 | | | | |
| U6- | QC818 | 419 | 693,483 | 0.060% |
| 13.1:DD20CR2 + EF1A2:CAS9 | | | | |
| U6- | QC815 | 489 | 682,207 | 0.072% |
| 13.1:DD43CR1 + EF1A2:CAS9 | | | | |
| U6- | QC816 | 917** | 539,681 | 0.170% |
| 13.1:DD43CR2 + EF1A2:CAS9 | | | | |

**At least the top 15 reads are specific mutations but only the top 10 are counted in the table to be consistent with other experiments. If all top 15 mutations are counted, the total Mutant reads is 1080 and the % Mutants is 0.200%.

[0543] In conclusion, our data indicate that the soybean optimized guide RNA/Cas endonuclease system is able to effectively cleave soybean endogenous genomic DNA and create imperfect NHEJ mutations at the specified genomic target sites.

### Example 16

### The Guide RNA/Cas Endonuclease System Delivers Double-Strand Breaks (DBSs) to the Maize Epsps Locus Resulting in Desired Point Mutations

[0544] Two maize optimized Cas9 endonucleases were developed and evaluated for their ability to introduce a double-strand break at a genomic target sequence. A first Cas9 endonuclease was as described in FIG. 1A (Example 2 and expression cassette SEQ ID NO:5). A second maize optimized Cas9 endonuclease (moCas9 endonuclease; SEQ ID NO:192) was supplemented with the SV40 nuclear localization signal by adding the signal coding sequence to the 5′ end of the moCas9 coding sequence (FIG. 13). The plant moCas9 expression cassette was subsequently modified by the insertion of the ST-LS1 intron into the moCas9 coding sequence in order to enhance its expression in maize cells and to eliminate its expression in E. coli and Agrobacterium. The maize ubiquitin promoter and the potato proteinase inhibitor II gene terminator sequences complemented the moCas9 endonuclease gene designs. The structural elements of the moCas9 expression cassette are shown in FIG. 13 and its amino acid and nucleotide sequences are listed as SEQ ID Nos: 192 and 193.

[0545] A single guide RNA (sgRNA) expression cassette was essentially as described in Example 1 and shown in FIG. 1 B. It consists of the U6 polymerase III maize promoter (SEQ ID NO: 9) and its cognate U6 polymerase III termination sequences (TTTTTTTT). The guide RNA (SEQ ID NO: 194) comprised a 20 nucleotide variable targeting domain (nucleotide1-20 of SEQ ID NO: 194) followed by a RNA sequence capable of interacting with the double strand break inducing endonuclease.

[0546] A maize optimized Cas9 endonuclease target sequence (moCas9 target sequence) within the EPSPS codon sequence was complementary to the 20 nucleotide variable sequence of the guide sgRNA determined the site of the Cas9 endonuclease cleavage within the EPSPS coding sequence.

[0547] The moCAS9 target sequence (nucleotides 25-44 of SEQ ID NO:209) was synthesized and cloned into the guide RNA-Cas9 expression vector designed for delivery of the components of the guide RNA-Cas9 system to the BMS (Black Mexican Sweet) cells through Agrobacterium-mediated transformation. Agrobacterium T-DNA delivered also the yeast FLP site-specific recombinase and the WDV (wheat dwarf virus) replication-associated protein (replicase). Since the moCas9 target sequences were flanked by the FLP recombination targets (FRT), they were excised by FLP in maize cells forming episomal (chromosome-like) structures. Such circular DNA fragments were replicated by the WDV replicase (the origin of replication was embedded into the WDV promoter) allowing their recovery in E. coli cells. If the maize optimizedCas9 endonuclease made a double-strand break at the moCas9 target sequence, its repair might produce mutations. The procedure is described in detail in: Lyznik, L. A., Djukanovic, V., Yang, M. and Jones, S. (2012) Double-strand break-induced targeted mutagenesis in plants. In: Transgenic plants: Methods and Protocols (Dunwell, J. M. and Wetten, A. C. eds). New York Heidelberg Dordrecht London: Springer, pp. 399-416.

[0548] The guideRNA/Cas endonuclease systems using either one of the maize optimized Cas9 endonucleases described herein, generated double-strand breaks in the moCas9 target sequence (Table 13). Table 13 shows the percent of the moCas9 target sequences mutagenized in the maize BMS cells using the moCas9 endonuclease of SEQ ID NO: 192 or the maize optimized cas9 endonuclease described in FIG. 1A and expressed by the expression cassette of SEQ ID NO:5. Both guideRNA/Cas endonuclease systems generated double-strand breaks (as judged by the number of targeted mutagenesis events) ranging from 67 to 84% of the moCas9 target sequences available on episomal DNA molecules in maize BMS cells. A sample of mutagenized EPSPS target sequences is shown in FIG. 14. This observation indicates that the maize optimized Cas9 endonuclease described herein is functional in maize cells and efficiently generates double-strand breaks at the moCas9 target sequence.

TABLE 13
Percent of the moCas9 target sequences mutagenized in the maize
BMS cells by maize optimized Cas9 endonucleases.

| | # of | | # of | |
|---|---|---|---|---|
| | moCas9 | # of intact | mutagenized | |
| Cas9 | target | moCas9 target | moCas9 target | Percent |
| endonuclease | sequences | sequences | sequences | mutagenesis |
| version | analyzed | recovered | found | (%) |
| SEQ ID | 81 | 13 | 68 | 84% |
| NO: 193 | | | | |
| (FIG. 13) | | | | |
| SEQ ID | 93 | 31 | 62 | 67% |
| NO: 5 | | | | |
| (FIG. 1A) | | | | |

[0549] In order to accomplish targeted genome editing of the maize chromosomal EPSPS gene, a polynucleotide modification template which provided genetic information for editing the EPSPS coding sequence was created (SEQ ID NO:195) and co-delivered with the guide RNA/Cas9 system components.

[0550] As shown in FIG. 12, the polynucleotide modification template comprised three nucleotide modifications (indicated by arrows) when compared to the EPSPS genomic sequence to be edited. These three nucleotide modifications are referred to as TIPS mutations as these nucleotide modifications result in the amino acid changes T-102 to 1-102 and P-106 to S-106. The first point mutation results from the substitution of the C nucleotide in the codon sequence ACT with a T nucleotide, a second mutation results from the substitution of the T nucleotide on the same codon sequence ACT with a C nucleotide to form the isoleucine codon (ATC), the third point mutation results from the substitution of the first C nucleotide in the codon sequence CCA with a T nucleotide in order to form a serine codon, TCA. (FIG. 12). Both codon sequences were located within 9 nucleotides of each other as shown in SEQ ID NO: 196: atcgcaatgcggtca. The three nucleotide modifications are shown in bold. The nucleotides between the two codon sequences were homologous to the non-edited EPSPS gene on the epsps locus. The polynucleotide modification template further comprised DNA fragments of maize EPSPS genomic sequence that were used as homologous sequence for the EPSPS gene editing. The short arm of homologous sequence (HR1-FIG. 12) was 810 base pairs long and the long arm of homologous sequence (HR2-FIG. 12) was 2,883 base pairs long (SEQ ID NO: 195).

[0551] In this example, the EPSPS polynucleotide modification template was co-delivered using particle gun bombardment as a plasmid (see template vector 1, FIG. 15) together with the guide sgRNA expression cassette and a maize optimizedCas9 endonuclease expression vector which contained the maize optimized Cas9 endonuclease expression cassette described in FIG. 1A (Example 1, SEQ ID NO:5) and also contained a moPAT selectable marker gene. Ten to eleven day-old immature embryos were placed, embryo-axis down, onto plates containing the N6 medium (Table 14) and incubated at 28° C. for 4-6 hours before bombardment. The plates were placed on the third shelf from the bottom in the PDS-1000 apparatus and bombarded at 200 psi. Post-bombardment, embryos were incubated in the dark overnight at 28° C. and then transferred to plates containing the N6-2 media for 6-8 days at 28° C. The embryos were then transferred to plates containing the N6-3 media for three weeks, followed by transferring the responding callus to plates containing the N6-4 media for an additional three-week selection. After six total weeks of selection at 28° C., a small amount of selected tissue was transferred onto the MS regeneration medium and incubated for three weeks in the dark at 28° C.

TABLE 14
Composition of Culture Media.

| Culture medium | Composition |
|---|---|
| N6 | 4.0 g/L N₆ Basal Salts (Sigma C-1416; Sigma-Aldrich Co., St. Louis, |
| | MO, USA), 1.0 ml/L Ericksson's Vitamin Mix (Sigma E-1511), 0.5 mg/L |
| | thiamine HCl, 190 g/L sucrose, 1.0 mg/L 2,4- |
| | dichlorophenoxyacetic acid (2,4-D), 2.88 g/L L-proline, 8.5 mg/L |
| | silver nitrate, 25 mg/L cefotaxime, and 6.36 g/L Sigma agar at pH |
| | 5.8 |
| N6-2 | 4.0 g/L N₆ Basal Salts (Sigma C-1416), 1.0 ml/L Ericksson's |
| | Vitamin Mix (Sigma E-1511), 0.5 mg/L thiamine HCl, 20 g/L |
| | sucrose, 1.0 mg/L 2,4-D, 2.88 g/L L-proline, 8.5 mg/L silver nitrate, |
| | 25 mg/L cefotaxime, and 8.5 g/L Sigma agar at pH 5.8 |
| N6-3 | 4.0 g/L N₆ Basal Salts (Sigma C-1416), 1.0 ml/L Ericksson's |
| | Vitamin Mix (Sigma E-1511), 0.5 mg/L thiamine HCl, 30 g/L |
| | sucrose, 1.5 mg/L 2,4-D, 0.69 g/L L-proline, 0.5 g/L 2-(N- |
| | morpholino)ethanesulphonic acid (MES) buffer, 0.85 mg/L silver |
| | nitrate, 5 mg/L glufosinate NH₄, and 8.0 g/L Sigma agar at pH 5.8 |
| N6-4 | 4.0 g/L N₆ Basal Salts (Sigma C-1416), 1.0 ml/L Ericksson's |
| | Vitamin Mix (Sigma E-1511), 0.5 mg/L thiamine HCl, 30 g/L |
| | sucrose, 1.5 mg/L 2,4-D, 0.69 g/L L-proline, 0.5 g/L MES buffer, |
| | 0.85 mg/L silver nitrate, 3 mg/L bialophos, and 8.0 g/L Sigma agar at |
| | pH 5.8 |
| MS | 4.3 g/L Murashige and Skoog (MS) salts (Gibco 11117; Gibco, |
| | Grand Island, NY), 5.0 ml/L MS Vitamins Stock Solution (Sigma |
| | M3900), 100 mg/L myo-inositol, 0.1 μmol abscisic acid (ABA), 1 mg/L |
| | indoleacetic acid (IAA), 0.5 mg/L zeatin, 60.0 g/L sucrose, 3.0 mg/L |
| | Bialaphos, and 8.0 g/L Sigma agar at pH 5.6 |

[0552] DNA was extracted by placing callus cell samples, two stainless-steel beads, and 450 ul of extraction buffer (250 mM NaCl, 200 mM Tris-HCl pH 7.4, 25 mM EDTA, 4.2 M Guanidine HCl) into each tube of a Mega titer rack. The rack was shaken in the Genogrinder at 1650 r.p.m. for 60 seconds and centrifuged at 3000×g for 20 min at 4° C. Three hundred μl of supernatant was transferred to the wells of the Unifilter 96-well DNA Binding GF/F Microplate (770-2810, Whatman, GE Healthcare). The plate was placed on the top of a Multi-well plate vacuum manifold (5017, Pall Life Sciences). A vacuum pressure was applied until the wells were completely dried. The vacuum filtration procedure was repeated one time with 100 ul extraction buffer and two times with 250 ul washing buffer (50 mM Tris-HCl pH 7.4, 200 mM NaCl, 70% ethanol). The residual ethanol was removed by placing the GF/F filter plate on an empty waste collection plate and centrifuged for 10 min at 3000×g. The DNA was eluted in 100 ul Elution Buffer (10 mM Tris-Ha pH 8.3) and centrifuged at 3000×g for 1 min. For each sample, four PCR reactions were run. They included approximately 40 ng genomic DNA, 10 ul REDExtract-N-Amp PCR ReadyMix (R4775, Sigma-Aldrich Co.), and 5 picomoles of each primer in a total volume of 20 ul. Primer combinations for each PCR reaction are listed in the Table 15.

TABLE 15
Primer combinations for PCR reactions.

| | | SEQ | |
|---|---|---|---|
| PCR | | ID | |
| reaction | Primer sequence | NO: | PCR product |
| F-E2 | CCGAGGAGATCGTGCTGCA | 197 | Template |
| | CAATGGCCGCATTGCAGTTC | 198 | randomly |
| | | | integrated |
| | | | or gene |
| | | | editing event |
| F-T | CCGAGGAGATCGTGCTGCA | 199 | Wild-type |
| | TGACCGCATTGCGATTCCAG | 200 | EPSPS allele |
| H-T | TCCAAGTCGCTTTCCAACAGGATC | 201 | TIPS editing |
| | TGACCGCATTGCGATTCCAG | 202 | event |
| F-E3 | CCGAGGAGATCGTGCTGCA | 203 | A fragment of |
| | ACCAAGCTGCTTCAATCCGACAAC | 204 | the epsps |
| | | | locus for |
| | | | cloning and |
| | | | sequencing |

[0553] The same PCR reactions were done on five samples of genomic DNA obtained from untransformed maize inbred plantlets. After an initial denaturation at 95° C. for 5 minutes, each PCR amplification was carried out over 35 cycles using DNA Engine Tetrad2 Thermal Cycler (BioRad Laboratories, Hercules, Calif.) at 94° C. for 30 sec denaturation, 68° C. for 30 sec annealing, and 72° C. for 1 min extension. PCR products F-E2, F-T and H-T were separated in 1% agarose gel at 100 Volts for 45 minutes, with 100 bp DNA Ladder (N0467S, NewEngland Biolabs). For sequencing, the F-F3 PCR amplified fragments from selected calli were cloned into pCR 2.1-TOPO vectors using the TOPO TA Cloning Kit (Invitrogen Corp, Carlsbad, Calif.). DNA sequencing was done with BigDye Terminator chemistry on ABI 3700 capillary sequencing machines (Applied Biosystems, Foster City, Calif.). Each sample contained about 0.5 ug Topo plasmid DNA and 6.4 pmole primer E3-EPex3 Rev (ACCAAGCTGCTTCAATCCGACAAC, SEQ ID NO: 204). Sequences were analyzed using the Sequencer program.

[0554] A sample of thirty one callus events selected on media containing bialophos (the moPAT selectable marker gene was part of the guide RNA-moCas9 expression vector) were screened for the presence of the TIPS point mutations. Twenty four events contained the TIPS point mutations integrated into genomic DNA (FIG. 16, the F-E2 treatment). Among them, six events showed the PCR amplification product of the chromosomal EPSPS gene with TIPS mutations (FIG. 16, the H-T treatment). The pair of PCR primers (one that can hybridize to the genomic epsps sequence not present in the EPSPS polynucleotide modification template and the other one binding to the edited EPSPS sequence present in the EPSPS polynucleotide modification template) distinguished the EPSPS-TIPS editing products from the wild-type epsps alleles or random insertions of the TIPS mutations. If one EPSPS allele was edited to contain the TIPS substitutions, it should be detected as a DNA fragment originating from the genomic epsps locus, regardless whether the TIPS substitutions were selected for during the PCR amplification process. The TIPS primer was replaced with the wild-type EPSPS primer (Table 15, the F-E3 pair of primers) and the PCR amplification products were cloned into the TOPO cloning vectors and sequenced. The sequencing data represented a random sample of the genomic epsps locus sequences in one of the selected events (FIG. 17, callus A12 3360.92). FIG. 17 shows that the method disclosed herein resulted in the successful nucleotide editing of three nucleotides (FIG. 17 bold) responsible for the TIPS mutations without altering any of the other epsps nucleotides, while the moCas9 target sequence (the site of guide RNA binding underlined in FIG. 17) was not mutagenized.

[0555] Also, the other EPSPS allele was not edited indicating that only one EPSPS allele was edited in this particular event (FIG. 17, lower section).

[0556] This data further shows that the present disclosure of the use of the guide RNA/Cas system for the gene editing demonstrates the ability to recover gene editing events at a high efficiency of 1 out of fewer than 10 selected events.

### Example 17

### The Guide RNA/Cas Endonuclease System Delivers Double-Strand Breaks to the Maize Epsps Locus Resulting in Maize Plants Containing an EPSPS-TIPS Edited Gene

[0557] The EPSPS gene edited events were produced and selected as described in the Example 16. In short, the EPSPS polynucleotide modification template was co-delivered using particle gun bombardment as a plasmid (see template vector 1, FIG. 15) together with the guide RNA expression cassette and a maize optimized Cas9 endonuclease expression vector which contained the maize optimized Cas9 endonuclease expression cassette described in FIG. 1A (Example 1, SEQ ID NO:5) and also contained a moPAT selectable marker gene.

[0558] After six weeks of selection at 28° C., a small amount of selected tissue was transferred onto the MS regeneration medium and incubated for three weeks in the dark at 28° C. After the three week incubation visible shoots were transferred to plates containing the MS-1 medium and incubated at 26° C. in the light for 1-2 weeks until they were ready to be sent to a greenhouse and transferred into soil flats. The Ms-1 medium contained: 4.3 g/L MS salts (Gibco 11117), 5.0 ml/L MS Vitamins Stock Solution (Sigma M3900), 100 mg/L myo-inositol, 40.0 g/L sucrose, and 6.0 g/L Bacto-Agar at pH 5.6.

[0559] Using the procedures described above, 390 T0 maize plants were produced originating from 3282 embryos, resulting in an overall transformation efficiency of 12%, further indicating that the guide RNA/Cas system used herein results in low or no toxicity (Table 16).

TABLE 16
Transformation efficiency of the EPSPS editing.

| | # | # Calli | Selection | T0 plants | Overall |
|---|---|---|---|---|---|
| Treatment | Embryos | selected | efficiency | to GH | Efficiency |
| Particle | 3282 | 489 | 15% | 390 | 12% |
| bombardment | | | | | |

[0560] DNA was extracted from each T0 plantlet 7-10 days after transfer to the greenhouse and PCR procedures were conducted as described in the Example 16 to screen the T0 plants for mutations at the epsps locus.

[0561] Seventy two percent of analyzed T0 plants (270/375, Table 17) contained mutagenized EPSPS alleles as determined by the end-point PCR procedure described in the Example 16. Most of the mutations (230/375 or 89%) were produced as a result of error-prone non-homologous end joining (NHEJ) while forty T0 plants (40/375 or 11%) contained the TIPS edited EPSPS alleles indicating the involvement of a tem plated double-strand break repair mechanism (Table 17).

TABLE 17
Mutations at the epsps locus.

| | | | | | Gene |
|---|---|---|---|---|---|
| | | Mutations | | | Editing |
| | TO Plants | at the | Mutation | TIPS | Rate |
| Transformation | Analyzed | epsps locus | rate | editing | (TIPS) |
| Particle | 375 | 270 | 72% | 40 | 11% |
| bombardment | | | | | |

[0562] A pair of primers (Table 15, the F-E3 pair of primers) was used to amplify a native, endogenous fragment of the epsps locus containing the moCas6 target sequence and the EPSPS editing site from the genomic DNA of selected T0 plants. The PCR amplification products were cloned into the TOPO cloning vectors and sequenced as described in Example 16. The sequencing data represent a random sample of the genomic epsps locus sequences from a particular T0 plant (Table 18) and indicate the genotype of the selected T0 plants. The list of the EPSPS-TIPS allele-containing T0 plants transferred to the pots is presented in Table 18 (a selected set of T0 plants from the original 40 TIPS-containing events).

TABLE 18
The epsps locus genotypes observed in T0 plants. TIPS refers
to a clone comprising the TIPS edited EPSPS sequence. NHEJ
refers to the presence of a NHEJ mutation and WT refers to
the presence of a wild-type EPSPS sequence amplified from
the native epsps locus.

| Event | Observed Sequences found at the |
|---|---|
| (T0 plant) | epsps locus |
| E1 | 16 TIPS, 13 NHEJ |
| E2 | 28 TIPS, 0 NHEJ |
| E3 | 2 TIPS, 20 WT |
| E4 | 1 TIPS, 28 NHEJ |
| E5 | 2 TIPS, 2 NHEJ, 9 WT |
| E6 | 10 TIPS, 17 NHEJ |
| E7 | 12 TIPS, 17 NHEJ |
| E8 | 11 TIPS, 15 NHEJ |
| E9 | 17 TIPS, 10 NHEJ |

[0563] As presented in Table 18, the selected plants of E1 and E3 to E9 contained the EPSPS-TIPS edited version of the EPSPS gene either accompanied by a wild-type EPSPS allele (WT) or a NHEJ mutagenized EPSPS allele (NHEJ). The numbers before TIPS, WT, NHEJ in Table18 indicate the frequency at which a particular version of the EPSPS allele was identified. If all clones contained the TIPS-edited EPSPS sequence, the analyzed plant was likely to be homozygous for the EPSPS-TIPS allele (see for example E2). If only about 50% of clones contained a TIPS-edited EPSPS sequence, the analyzed plant was likely to be hemizygous for the EPSPS-TIPS allele (see for example E1). Other plants, such as E3 or E4, were likely to be chimeric for TIPS. In one event, E2, the T0 plant contained only TIPS-edited sequence at the epsps locus indicating that the guide RNA/Cas endonuclease system disclosed herein resulted in the successful nucleotide editing of three nucleotides (FIG. 17 bold) responsible for the two EPSPS-TIPS alleles at the epsps locus in maize plants.

[0564] A qPCR analysis was performed on the selected T0 plants to estimate the copy number of the wild-type EPSPS genes and the moCas9 endonuclease sequences. Multiplex qPCR amplifications of the maize EPSPS gene and the ADH housekeeping gene were carried out on the DNA samples from T0 plants. The primers and probes used in the PCR reaction are shown in Table 19.

TABLE 19
Primers used in qPCR analysis of T0 plants.

| Primer/probe | Primary PCR Primer Sequence | SEQ ID NO: |
|---|---|---|
| primer qADH F | 5′-CAAGTCGCGGTTTTCAATCA-3 | SEQ ID NO: 217 |
| Primer qADH R | 5′-TGAAGGTGGAAGTCCCAACAA-3′ | SEQ ID NO: 218 |
| probe ADH-VIC | VIC-TGGGAAGCCTATCTACCAC | SEQ ID NO: 219 |
| Probe wtEPSPS | 6FAM-CGGCCATTGACAGCA-MGB-NFQ | SEQ ID NO: 220 |
| Forward primer | 5′-TCTTGGGGAATGCTGGAACT-3′ | ,SEQ ID NO: 221 |
| qEPSPS F | | |
| reverse primer | 5′-CACCAGCAGCAGTAACAGCTG-3′ | SEQ ID NO: 222 |
| qEPSPSR | | |
| FAM-wtEPSPS | 6FAM-TGCTGTCAATGGCCGCA | SEQ ID NO: 223 |
| R probe | | |
| forward primer | 5′-TCTTGGGGAATGCTGGAACT-3′ | SEQ ID NO: 224 |
| qEPSPS F | | |
| reverse primer q | 5′-CCACCAGCAGCAGTAACAGC-3 | SEQ ID NO: 225) |
| wtEPSPS RA | | |

[0565] All analyses were conducted using the LightCycler 480 Real-Time PCR System (Roche Diagnostics). A threshold value for the wtEPSPS genotype was set at 1.76. Every sample showing less than 1.76 copies of EPSPS, with the end-point florescence measurements up to two times lower than the wild-type control, was categorized as the One Allele EPSPS genotype (hemizygous for the wild-type EPSPS allele).

[0566] A qPCR method was used to estimate the TIPS sequence copy number. The primers and probes used in the qPCR reaction are shown in Table 20.

TABLE 20
Primers used in qPCR analysis to estimate the TIPS
sequence copy number.

| Primer/probe | Primary PCR Primer Sequence | SEQ ID NO: |
|---|---|---|
| forward primer q | 5′-GGAAGTGCAGCTCTTCTTGGG-3′ | SEQ ID NO: 226 |
| epTIPS F | | |
| reverse primer q | 5′-AGCTGCTGTCAATGACCGC-3′ | SEQ ID NO: 227 |
| epTIPS R | | |
| TIPS probe | 6FAM-AATGCTGGAATCGCA | SEQ ID NO: 228) |

[0567] A comparative Ct method with Delta Ct values normalized to the average Delta Ct from the bi-allelic TIPS genotypes provided a copy number estimation for the TIPS sequence detected in the analyzed plant samples.

TABLE 21
qPCR genotyping and copy number of selected T0 plants.

| | TIPS | Wild-type | | moCas9 |
|---|---|---|---|---|
| | EPSPS | EPSPS | | coding |
| Event name | allele | allele # | TIPS copy # | sequence |
| E1 | positive | Null | 5 | positive |
| E2 | positive | Null | 2 | positive |
| E7 | positive | Null | 6 | positive |
| E8 | positive | Null | 1 | positive |
| E9 | positive | Null | 3 | positive |

[0568] The qPCR genotyping indicated that no wild-type EPSPS alleles were detected in the selected T0 plants of Events E1, E2, E7, E8 and E9 (Table 21). Both, the TIPS template sequences and the moCas9 coding sequence were found in the selected T0 plants, presumably, as a result of random insertions associated with the transformation process (Table 21: for the TIPS template sequences E1, E7, and E9 T0 plants). Both genetic elements (the randomly inserted TIPS templates and the moCas9 expression cassette) can be segregated out by standard breeding procedures in the T1 progeny generation, if not linked to the edited EPSPS-TIPS gene.

[0569] T0 plants grew well in the greenhouse and were fertile. A sample of T0 plants was sprayed with a 1× dose of glyphosate (Roundup Powermax) at V3 growth stage using the spray booth setting of 20 gallons per acre. The 1× dose of glyphosate was prepared as follow: 2.55 ml Powermax in 300 ml water (active ingredient: glyphosate, N-(phosphonomethyl) glycine, in the form of its potassium salt at 48.7%). Seven days after glyphosate application, no leaf tissue damage was observed in some of the T0 plants. These plantlets were hemizygous for the EPSPS-TIPS alleles, while other plantlets were severely damaged. One plant showing no damage to the leaf tissue 14 days after herbicide application contained 21 EPSPS-TIPS alleles among 44 genomic clones of the epsps locus (cloned and sequenced as described in the Example 16).

[0570] These data indicate that a guide RNA/Cas system can be used to create a TIPS-edited EPSPS allele in maize. Maize plants homozygous at the epsps-tips locus (two EPSPS alleles edited) with no additional insertion of the TIPS template (plant E2) were obtained. Furthermore, some EPSPS-TIPS edited maize plants did show some level of tolerance against a 1× dose of glyphosate.

### Example 18

### Guide RNA/Cas Endonuclease Mediated DNA Cleavage in Maize Chromosomal Loci Enables Transgene Insertion in an Elite Maize Line

[0571] To test whether a maize optimized guide RNA/Cas system can cleave an maize chromosomal locus and enable homologous recombination (HR) mediated pathways to site-specifically insert a transgene in an elite maize line, 4 loci were selected on the maize chromosome 1 located between 51.54cM to 54.56 cM (FIG. 18). Two target sites for a Cas endonuclease were identified at each of the four loci and are referred to as MHP14Cas-1, MHP14Cas-3, TS8Cas-1, TS8Cas2, TS9Cas-2, TS9Cas-3, TS10Cas-1 and TS10Cas-3 (FIG. 19, Table 22, SEQ ID NOs:229-236).

TABLE 22
Maize genomic target sites targeted by a guide
RNA/Cas endonuclease.

| | | | Maize Genomic Target | | SEQ ID |
|---|---|---|---|---|---|
| Locus | Location | Target Site | Site Sequence | PAM | NO: |
| MHP14 | Chr. 1: | MHP14Cas-1 | gttaaatctgacgtgaatctgtt | TGG | 229 |
| | 51.54cM | MHP14Cas-3 | acaaacattgaagcgacatag | TGG | 230 |
| TS8 | Chr. 1: | TS8Cas-1 | gtacgtaacgtgcagtac | TGG | 231 |
| | 52.56cM | TS8Cas-2 | gctcatcagtgatcagctgg | TGG | 232 |
| TS9 | Chr. 1: | TS9Cas-2 | ggctgtttgcggcctcg | AGG | 233 |
| | 53.56cM | TS9Cas-3 | gcctcgaggttgcacgcacgt | CGG | 234 |
| TS10 | Chr.1: | TS10Cas-1 | gcctcgccttcgctagttaa | GGG | 235 |
| | 54.56cM | TS10Cas-3 | gctcgtgttggagataca | GGG | 236 |

[0572] The maize optimized Cas endonuclease cassette (SEQ ID NO: 5 was as prepared as describe in Example 1. Long guide RNA expression cassettes comprising a variable targeting domain targeting one of the 8 genomic target sites, driven by a maize U6 polymerase III promoter, and terminated by a maize U6 polymerase III terminator were designed as described in Example 1 and 3 and listed in Table 23. A donor DNA (HR repair DNA) containing a selectable marker (a phosphomannose-isomerase (PMI) expression cassette) flanked by two homologous regions was constructed using standard molecular biology techniques (FIG. 20).

TABLE 23
List of guide RNA (gRNA) and Donor DNA expression cassettes

| | | | Donor DNA |
|---|---|---|---|
| | | gRNA | (SEQ ID |
| Locus | Target Site | (SEQ ID NO:) | NO:) |
| MHP14 | MHP14Cas-1 | 245 | 253 |
| | MHP14Cas-3 | 246 | 254 |
| TS8 | TS8Cas-1 | 247 | 255 |
| | TS8Cas-2 | 248 | 256 |
| TS9 | TS9Cas-2 | 249 | 257 |
| | TS9Cas-3 | 250 | 258 |
| TS10 | TS10Cas-1 | 251 | 259 |
| | TS10Cas-3 | 252 | 260 |

[0573] A vector containing the maize optimized Cas9 endonuclease of SEQ ID NO: 5, a vector containing one of eight long guide RNA expression cassettes of SEQ ID NOs: 245-252, and a vector containing one of eight donor DNAs of SEQ ID NOs: 253-260 were co-delivered to maize elite line immature embryos by particle-mediated delivery as described in Example 10. About 1000 embryos were bombarded for each target site. Since the donor DNA contained a selectable marker, PMI, successful delivery of the donor DNA allowed for callus growth on mannose media. Putative HR-mediated transgenic insertions were selected by placing the callus on mannose containing media. After selection, stable shoots on maturation plates were sampled, total genomic DNA extracted, and using the primer pairs shown in Table 24 (corresponding to SEQ ID NOs: 261-270), PCR amplification was carried out at both possible transgene genomic DNA junctions to identify putative HR-mediated transgenic insertions.

TABLE 24
Primer sequences used for integration event screening
at each target site

| | | | | SEQ ID |
|---|---|---|---|---|
| Locus | Target Site | Junction | Primer | NO: |
| UBIR | donor | 1 | CCATGTCTAACTGTTCATTTATATGAT | 261 |
| | | | TCTCT | |
| PSBF | donor | 2 | GCTCGTGTCCAAGCGTCACTTACGAT | 262 |
| | | | TAGCT | |
| MHP14 | MHP14Cas-1 | 14-1HR1f | CTCACATGAGGCTCTTCTTTGCTTGCT | 263 |
| | MHP14Cas-3 | 14-1HR2r | AGGATCCTATTCCCCAATTTGTAGAT | 264 |
| CHR1-8 | TS8Cas-1 | 8HR1f | CAGTCCGTGGATTGAAGCCAT | 265 |
| | TS8Cas-2 | 8HR2r | CTCTGTCTCCGAGACGTGCTTA | 266 |
| CHR1-9 | TS9Cas-2 | 9HR1f | GGAGCAAATGTTTTAGGTATGAAATG | 267 |
| | TS9Cas-3 | 9HR2r | CGGATTCTAAAGATCATACGTAAATG | 268 |
| | | | AA | |
| CHR1- | TS10Cas-1 | 10HR1f | TGGCTTGTCTATGCGCATCTC | 269 |
| 10 | TS10Cas-3 | 10HR2r | CCAGACCCAAACAGCAGGTT | 270 |

The same genomic primers were used for each of the two target sites at one locus. The resulting amplifications were sequenced to determine if these sites were mutated or contained a transgene insertion.

[0574] The “Event Recovery frequency” was calculated using the number of events recovered divided by the total number of embryos bombarded, and may indicate if an endonuclease has some toxic effect or not (Table 26). Hence, if 1000 embryos were bombarded and 240 were recovered, the Event Recovery frequency is 24%. Table 26 indicates that for all target sites analyzed the Event Recovery frequency ranged between 17 and 28%, indicating that the guide RNA/Cas system used herein results in low or no toxicity. Cas endonuclease activity was measured in-planta by determining the “Target Site Mutation frequency” (Table 26) is defined as: (number of events with target site modification/total number recovered events)*100%. Hence, if 240 events were recovered and 180 events showed a mutation, the Target Site Mutation frequency is 75%. The target site mutation frequency was measured using target site allele copy number as described in Example 9 of U.S. application Ser. No. 13/886,317, filed on May 3, 2013. The primers and probes for obtaining the target site copy number using qPCR at each site were as listed in Table 25 (SEQ ID NO: 271-294).

TABLE 25
Primer and probe sequences used to assess DNA
cleavage at 8 maize genomic target sites

| | | | SEQ |
|---|---|---|---|
| Target Site | Probe | | ID |
| Designation | primers | Primer sequence | NO: |
| MHP14Cas-1 | probe | CAGATTCACGTCAGATTT | 271 |
| | forward | CATAGTGGTGTATGAAAGGAAGCACTT | 272 |
| | reverse | CATTTTGGATTGTAATATGTGTACCT | 273 |
| | | CATA | |
| MHP14Cas-3 | probe | CACCACTATGTCGCTTC | 274 |
| | forward | CGGATGCACGAAAATTGTAGGA | 275 |
| | reverse | CTGACGTGAATCTGTTTGGAATTG | 276 |
| TS8Cas-1 | probe | TACGTAACGTGCAGTACT | 277 |
| | forward | ACGGACGGACCATACGTTATG | 278 |
| | reverse | TCAGCTGGTGGAGTATATTAGTTCGT | 279 |
| TS8Cas-2 | probe | CCAGCTGATCACTGATGA | 280 |
| | forward | ACGGACGGACCATACGTTATG | 281 |
| | reverse | CGCACATGTTATAAATTACAATGCAT | 282 |
| TS9Cas-2 | probe | CTGTTTGCGGCCTC | 283 |
| | forward | CTGCGGAGCTGCTGGCGAT | 284 |
| | reverse | CTTGCTGGCTTCGTCTGTCA | 285 |
| TS9Cas-3 | probe | CCGACGTGCGTGCAA | 286 |
| | forward | CTGCGGAGCTGCTGGCGAT | 287 |
| | reverse | CTTGCTGGCTTCGTCTGTCA | 288 |
| TS10Cas-1 | probe | TCGCCTTCGCTAGTTAA | 289 |
| | forward | AAGACCTGGCCGGTTTTCCA | 290 |
| | reverse | TAGCGGCCATTGCCATCA | 291 |
| TS10Cas-3 | probe | CTGTATCTCCAACACGAGC | 292 |
| | forward | AAGACCTGGCCGGTTTTCCA | 293 |
| | reverse | TAGCGGCCATTGCCATCA | 294 |

[0575] As shown in Table 26, all 8 guide RNA/Cas9 systems were very efficient in cleaving their target DNA and inducing mutations (by non-homologous end joining (NHEJ) as is evidenced by a mutation frequency ranging from 33-90%.

[0576] All events were also screened for the presence of an inserted transgene. The insertion event screening for each target site is illustrated in FIG. 21. The primers used for insertion PCR analysis at each site are listed in Table 24. FIG. 22 shows one example of an insertion event screening PCR result. The frequency of transgene insertion was determined by calculating the “Insertion frequency” which is defined as: (number of events with target site insertion/total number recovered events)*100%. Hence, if 240 events were recovered and 21 events showed a transgene insertion, the Insertion frequency was 9%.

TABLE 26
Activity of the guide RNA/Cas 9 system at 8 target sites as
determined by target site mutation frequency and transgene
insertion frequency at the desired target site in maize plant
tissue

| | | | Insertion |
|---|---|---|---|
| | | Target Site Mutation | frequency |
| Target Site | Event Recovery (%) | (%) | (%) |
| TS10Cas-1 | 24% | 75% | 9% (7*) |
| TS10Cas-3 | 22% | 83% | 16% (20*) |
| TS8Cas-1 | 17% | 90% | 14% (9*) |
| TS8Cas-2 | 27% | 84% | 8% (10*) |
| MHP14Cas-1 | 17% | 33% | 2% (2*) |
| MHP14Cas-3 | 28% | 68% | 4% (1*) |
| TS9Cas-2 | 23% | 62% | 8%** |
| TS9Cas-3 | 28% | 84% | 8%** |

*Number of events with HR1 and HR2 both junctions positive
**only HR2 junction available

[0577] Sequence—confirmed-PCR amplifications indicated a site-specific transgene insertion for each of the 8 target sites as shown in Table 26 (column Insertion frequency). A transgene cassette was inserted at all 8 target sites with high efficiency (2-16%). The number of events containing amplifications across both transgene genomic DNA junctions, indicating near perfect site-specific transgene insertion, are show in brackets in Table 26.

[0578] Taken together, these data demonstrates that maize chromosomal loci cleaved with the maize optimized guide RNA/Cas system described herein can be used to insert transgenes at high frequencies in maize elite inbred line.

### Example 19

### Delivery of the Guide RNA/Cas9 Endonuclease System DNA to Soybean by Stable Transformation

[0579] A soybean U6 small nuclear RNA promoter (GM-U6-9.1; SEQ ID NO: 295) was identified in a similar manner as the soybean promoter GM-U6-13.1 (SEQ ID NO:120) described in Example 12. The GM-U6-9.1 promoter was used to express guide RNA to direct Cas9 nuclease to designated genomic target site.

[0580] A soybean codon optimized Cas9 endonuclease expression cassette (such as for example EF1A2:CAS9, SEQ ID NO: 296) and a guide RNA expression cassette (such as for example U6-9.1:DD20CR1; SEQ ID NO: 297) were linked (such as U6-9.1: DD20CR1+EF1A2:CAS9; SEQ ID NO: 298, FIG. 23A) and integrated into a DNA plasmid that was co-delivered with another plasmid comprising a donor DNA (repair DNA) cassette (such as DD20HR1-SAMS:HPT-DD20HR2; SEQ ID NO: 299) to young soybean somatic embryos in the form of embryogenic suspension cultures by particle gun bombardment (FIGS. 23A and 23B). Other guide RNA/Cas9 DNA constructs targeting various soybean genomic sites and donor DNA constructs for site-specific transgene integration through homologous recombination were similarly configured and are listed in Table 27. The four gRNA/Cas9 constructs differed only in the 20 bp guide RNA targeting domain (variable targeting domain) targeting the soybean genomic target sites DD20CR1 (SEQ ID NO: 125), DD20CR2 (SEQ ID NO: 126), DD43CR1 (SEQ ID NO: 127), or DD43CR2 (SEQ ID NO: 128). The two donor DNA constructs differed only in the homologous regions such as DD20HR1 and DD20HR (FIG. 23B), or DD43HR1 and DD43HR2. These guide RNA/Cas9 DNA constructs and donor DNAs were co-delivered to an elite (93B86) or a non-elite (Jack) soybean genome by the stable transformation procedure described below.

TABLE 27
Guide RNA/Cas9 Mediated Soybean Stable Transformation.

| | | | SEQ ID |
|---|---|---|---|
| Experiment | Guide RNA/Cas9 | Donor DNA | NOs: |
| U6-9.1DD20CR1 | U6-9.1:DD20CR1 + EF1A2:CAS9 | DD20HR1-SAMS:HPT-DD20HR2 | 298, 299 |
| U6-9.1DD20CR2 | U6-9.1:DD20CR2 + EF1A2:CAS9 | DD20HR1-SAMS:HPT-DD20HR2 | 300, 299 |
| U6-9.1DD43CR1 | U6-9.1:DD43CR1 + EF1A2:CAS9 | DD43HR1-SAMS:HPT-DD43HR2 | 301, 302 |
| U6-9.1DD43CR2 | U6-9.1:DD43CR2 + EF1A2:CAS9 | DD43HR1-SAMS:HPT-DD43HR2 | 303, 302 |

[0581] Soybean somatic embryogenic suspension cultures were induced from a DuPont Pioneer proprietary elite cultivar 93B86 as follows. Cotyledons (˜3 mm in length) were dissected from surface sterilized, immature seeds and were cultured for 6-10 weeks in the light at 26° C. on a Murashige and Skoog (MS) media containing 0.7% agar and supplemented with 10 mg/ml 2,4-D (2,4-Dichlorophenoxyacetic acid). Globular stage somatic embryos, which produced secondary embryos, were then excised and placed into flasks containing liquid MS medium supplemented with 2,4-D (10 mg/ml) and cultured in light on a rotary shaker. After repeated selection for clusters of somatic embryos that multiplied as early, globular staged embryos, the soybean embryogenic suspension cultures were maintained in 35 ml liquid media on a rotary shaker, 150 rpm, at 26° C. with fluorescent lights on a 16:8 hour day/night schedule. Cultures were subcultured every two weeks by inoculating approximately 35 mg of tissue into 35 ml of the same fresh liquid MS medium.

[0582] Soybean embryogenic suspension cultures were then transformed by the method of particle gun bombardment using a DuPont Biolistic™ PDS1000/HE instrument (Bio-Rad Laboratories, Hercules, Calif.). To 50 μl of a 60 mg/ml 1.0 mm gold particle suspension were added in order: 30 μl of equal amount (30 ng/μl) plasmid DNA comprising, for example, U6-9.1:DD20CR1+EF1A2:CAS9 (SEQ ID NO:298) and plasmid DNA comprising, for example, (DD20HR1-SAMS:HPT-DD20HR2, SEQ ID NO: 299) (Experiment U6-9.1 DD20CR1 listed in Table 27) 20 μl of 0.1 M spermidine, and 25 μl of 5 M CaCl₂. The particle preparation was then agitated for 3 minutes, spun in a centrifuge for 10 seconds and the supernatant removed. The DNA-coated particles were then washed once in 400 μl 100% ethanol and resuspended in 45 μl of 100% ethanol. The DNA/particle suspension was sonicated three times for one second each. Then 5 μl of the DNA-coated gold particles was loaded on each macro carrier disk.

[0583] Approximately 300-400 mg of a two-week-old suspension culture was placed in an empty 60×15 mm Petri dish and the residual liquid removed from the tissue with a pipette. For each transformation experiment, approximately 5 to 10 plates of tissue were bombarded. Membrane rupture pressure was set at 1100 psi and the chamber was evacuated to a vacuum of 28 inches mercury. The tissue was placed approximately 3.5 inches away from the retaining screen and bombarded once. Following bombardment, the tissue was divided in half and placed back into liquid media and cultured as described above.

[0584] Five to seven days post bombardment, the liquid media was exchanged with fresh media containing 30 mg/ml hygromycin as selection agent. This selective media was refreshed weekly. Seven to eight weeks post bombardment, green, transformed tissue was observed growing from untransformed, necrotic embryogenic clusters. Isolated green tissue was removed and inoculated into individual flasks to generate new, clonally propagated, transformed embryogenic suspension cultures. Each clonally propagated culture was treated as an independent transformation event and subcultured in the same liquid MS media supplemented with 2,4-D (10 mg/ml) and 30 ng/ml hygromycin selection agent to increase mass. The embryogenic suspension cultures were then transferred to agar solid MS media plates without 2,4-D supplement to allow somatic embryos to develop. A sample of each event was collected at this stage for quantitative PCR analysis.

[0585] Cotyledon stage somatic embryos were dried-down (by transferring them into an empty small Petri dish that was seated on top of a 10 cm Petri dish containing some agar gel to allow slow dry down) to mimic the last stages of soybean seed development. Dried-down embryos were placed on germination solid media and transgenic soybean plantlets were regenerated. The transgenic plants were then transferred to soil and maintained in growth chambers for seed production. Transgenic events were sampled at somatic embryo stage or T0 leaf stage for molecular analysis.

[0586] Similar transformation experiments (U6-9.1DD20CR2, U6-9.1DD43CR1, U6-9.1DD43CR2) with the components listed in Table 27 and using the elite cultivar 93B86 were performed as described above.

[0587] Two transformation experiments, U6-9.1DD20CR1 and U6-9.1DD43CR1 listed in Table 27, were also performed in a non-elite soybean cultivar “Jack” to test the gRNA/Cas9 system performance in different soybean genotypes.

### Example 20

### Detection of Site-Specific NHEJ Mediated by the Guide RNA/Cas9 System in Stably Transformed Soybean

[0588] Genomic DNA was extracted from somatic embryo samples and analyzed by quantitative PCR using a 7500 real time PCR system (Applied Biosystems, Foster City, Calif.) with target site-specific primers and FAM-labeled fluorescence probe to check copy number changes of the target site DD20 or DD43 (FIG. 24 A-C). The qPCR analysis was done in duplex reactions with a heat shock protein (HSP) gene as the endogenous controls and a wild type 93B86 genomic DNA sample that contains one copy of the target site with 2 alleles, as the single copy calibrator. The HSP endogenous control qPCR employed primer probe set HSP-F/HSP-T/HSP-R. The DD20-CR1 (SEQ ID NO:306) and DD20-CR2 (SEQ ID NO:307) specific qPCR employed primer probe set DD20-F (SEQ ID NO:308)/DD20-T(SEQ ID NO:309)/DD20-R(SEQ ID NO:310). The DD43-CR1 (SEQ ID NO:311) specific qPCR employed primer probe set DD43-F(SEQ ID NO:313)/DD43-T(SEQ ID NO:315)/DD43-R (SEQ ID NO:316) while the DD43-CR2 (SEQ ID NO:312) specific qPCR employed primer probe set DD43-F2(SEQ ID NO:314)/DD43-T/DD43-R. The guide RNA/Cas9 DNA (SEQ ID NOs: 298, 300, 301, and 303) specific qPCR employed primer probe set Cas9-F (SEQ ID NO:317/Cas9-T(SEQ ID NO:318)/Cas-9-R(SEQ ID NO:319). The donor DNA (SEQ ID NOS: 299, and 302) specific qPCR employed primer probe set Sams-76F (SEQ ID NO:320)/FRT1I63-T (SEQ ID NO:321)/FRT1 I-41F (SEQ ID NO:322). The endogenous control probe HSP-T was labeled with VIC and the gene-specific probes DD20-T, DD43-T, Cas9-T, and FRT1I63-T were labeled with FAM for the simultaneous detection of both fluorescent probes (Applied Biosystems). PCR reaction data were captured and analyzed using the sequence detection software provided with the 7500 real time PCR system and the gene copy numbers were calculated using the relative quantification methodology (Applied Biosystems).

[0589] Since the wild type 93B86 genomic DNA with two alleles of the target site was used as the single copy calibrator, events without any change of the target site would be detected as one copy herein termed Wt-Homo (qPCR value >=0.7), events with one allele changed, which is no longer detectible by the target site-specific qPCR, would be detected as half copy herein termed NHEJ-Hemi (qPCR value between 0.1 and 0.7), while events with both alleles changed would be detected as null herein termed NHEJ-Null (qPCR value=<0.1). The wide range of the qPCR values suggested that most of the events contained mixed mutant and wild type sequences of the target site. High percentage of NHEJ-Hemi (ranging from 10.1 to 33.5%, Table 28) and NHEJ-Null (ranging from 32.3 to 46.4%, Table 21) were detected in all four experiments with combined NHEJ average frequencies of more than 60% (Table 28).

TABLE 28
Target Site Mutations and Site Specific Gene Integration Induced
by the Guide RNA/Cas9 system in elite soybean germplasm. Numbers indicate no.
of events (numbers in parentheses are %). NA = not analyzed.

| | | Wt-Homo | NHEJ- | NHEJ-Null | Insertion |
|---|---|---|---|---|---|
| Project | Total event | (%) | Hemi (%) | (%) | Frequency (%) |
| U6-9.1DD20CR1 | 239 | 85 (35.6%) | 77 (32.2%) | 77 (32.2%) | 11 (4.6%) |
| U6-9.1DD20CR2 | 79 | 43 (54.4%) | 8 (10.1%) | 28 (35.4%) | NA |
| U6-9.1DD43CR1 | 263 | 53 (20.2%) | 88 (33.5%) | 122 (46.4%) | 10 (3.8%) |

TABLE 29
Target Site Mutations and Site Specific Gene Integration Induced
by the Guide RNA/Cas9 system in non-elite soybean germplasm. Numbers indicate
no. of events (numbers in parentheses are % of the total analyzed events).

| | Total | Wt-Homo | NHEJ- | NHEJ-Null | Insertion |
|---|---|---|---|---|---|
| Project | event | (%) | Hemi (%) | (%) | frequency (%) |
| U6-9.1DD20CR1-Jack | 149 | 99 (66.4%) | 34 (22.8%) | 16 (10.7%) | 0 (0%) |
| U6-9.1DD43CR1-Jack | 141 | 84 (59.6%) | 27 (19.1%) | 30 (21.3%) | 1 (0.7%) |

[0590] Both NHEJ-Hemi and NHEJ-Null were detected in the two experiments U6-9.1DD20CR1-Jack and U6-9.1DD43CR1-Jack repeated in “Jack” genotype though at lower frequencies (Table 29). The differences between NHEJ frequencies were likely caused by variations between transformation experiments.

[0591] The target region of NHEJ-Null events were amplified by regular PCR from the same genomic DNA samples using DD20-LB (SEQ ID NO: 323) and DD20-RB (SEQ ID NO: 326) primers specific respectively to DD20-HR1 and DD20-HR2 for DD20 target site specific HR1-HR2 PCR amplicon (FIG. 25 A-C; SEQ ID NO: 329), or DD43-LB (SEQ ID NO: 327) and DD43-RB (SEQ ID NO: 328) primers specific respectively to DD43-HR1 and DD43-HR2 for DD43 target site specific HR1-HR2 PCR amplicon (SEQ ID NO: 332). The PCR bands were cloned into pCR2.1 vector using a TOPO-TA cloning kit (Invitrogen) and multiple clones were sequenced to check for target site sequence changes as the results of NHEJ. Various small deletions at the Cas9 cleavage site, 3 bp upstream of the PAM, were revealed at all four tested target sites (FIG. 26 A-C). Small insertions were also detected in some sequences. Different mutated sequences were identified from some of the same events indicating the chimeric nature of these events. Some of the same mutated sequences were also identified from different events suggesting that the same mutations could have happened independently or some of the events could be clonal events. These sequence analysis confirmed the occurrence of NHEJ mediated by the guide RNA/Cas9 system at the specific Cas9 target sites.

### Example 21

### Identification of Site-Specific Gene Integration Via Homologous Recombination Mediated by the Guide RNA/Cas9 System in Stably Transformed Soybean

[0592] Site-specific gene integration via guide RNA/Cas9 system mediated DNA homologous recombination was determined by border-specific PCR analysis. The 5′ end borders of DD20CR1 and DD20CR2 events were amplified as a 1204 bp DD20 HR1-SAMS PCR amplicon (SEQ ID NO: 330) by PCR with primers DD20-LB (SEQ ID NO: 323) and Sams-A1 (SEQ ID NO: 324) while the 3′ borders of the same events were amplified as a 1459 bp DD20 NOS-HR2 PCR amplicon (SEQ ID NO: 331) with primers QC498A-S1 and DD20-RB (FIG. 25 A-C). Any events with both the 5′ border and 3′ border-specific bands amplified are considered as site-specific integration events through homologous recombination containing the transgene from the donor DNA fragment DD20HR1-SAMS:HPT-DD20HR2or its circular form (FIG. 23). The 5′ end borders of DD43CR1 and DD43CR2 events were amplified as a 1202 bp DD43 HR1-SAMS PCR amplicon (SEQ ID NO: 333) by PCR with primers DD43-LB and Sams-A1 while the 3′ borders of the same events were amplified as a 1454 bp DD43 NOS-HR2 PCR amplicon (SEQ ID NO: 334) with primers QC498A-S1 (SEQ ID NO: 325) and DD43-RB (SEQ ID NO: 328). Any events with both the 5′ border and 3′ border-specific bands amplified are considered as site-specific integration events through homologous recombination containing the transgene from repair DNA fragment DD43HR1-SAMS:HPT-DD43HR2 or its circular form. Some of the border-specific PCR fragments were sequenced and were all confirmed to be recombined sequences as expected from homologous recombination. On average, gene integration through the guide RNA/Cas9 mediated homologous recombination occurred at approximately 4% of the total transgenic events (Insertion frequency, Table 28 and Table 29). One homologous recombination event was identified from experiment U6-9.1 DD43CR1-Jack repeated in “Jack” genotype (Table 29).

### Example 22

### The crRNA/tracrRNA/Cas Endonuclease System Cleaves Chromosomal DNA in Maize and Introduces Mutations by Imperfect Non-Homologous End-Joining

[0593] To test whether the maize optimized crRNA/tracrRNA/Cas endonuclease system described in Example 1 could recognize, cleave, and mutate maize chromosomal DNA through imprecise non-homologous end-joining (NHEJ) repair pathways, three different genomic target sequences were targeted for cleavage (see Table 30) and examined by deep sequencing for the presence of NHEJ mutations.

TABLE 30
Maize genomic target sequences targeted by a crRNA/tracrRNA/Cas
endonuclease system.

| | | Cas RNA | | | | |
|---|---|---|---|---|---|---|
| | | System | Target Site | Maize Genomic Target Site | PAM | SEQ ID |
| Locus | Location | Used | Designation | Sequence | Sequence | NO: |
| LIG | Chr. 2: | crRNA/ | LIGCas-1 | GTACCGTACGTGCCCCGGCGG | AGG | 16 |
| | 28.45cM | tracrRNA | | | | |
| | | crRNA/ | LIGCas-2 | GGAATTGTACCGTACGTGCCC | CGG | 17 |
| | | tracrRNA | | | | |
| | | crRNA/ | LIGCas-3 | GCGTACGCGTACGTGTG | AGG | 18 |
| | | tracrRNA | | | | |

LIG = Liguleless 1 Gene Promoter

[0594] The maize optimized Cas9 endonuclease expression cassette, crRNA expression cassettes containing the specific maize variable targeting domains (SEQ ID NOs: 445-447) complementary to the antisense strand of the maize genomic target sequences listed in Table 30 and tracrRNA expression cassette (SEQ ID NO: 448) were co-delivered to 60-90 Hi-II immature maize embryos by particle-mediated delivery (see Example 5) in the presence of BBM and WUS2 genes (see Example 6). Hi-II maize embryos transformed with the Cas9 and long guide RNA expression cassettes targeting the LIGCas-3 genomic target site (SEQ ID NO: 18) for cleavage served as a positive control and embryos transformed with only the Cas9 expression cassette served as a negative control. After 7 days, the 20-30 most uniformly transformed embryos from each treatment were pooled and total genomic DNA was extracted. The region surrounding the intended target site was PCR amplified with Phusion® High Fidelity PCR Master Mix (New England Biolabs, M0531L) adding on the sequences necessary for amplicon-specific barcodes and Illumnia sequencing using “tailed” primers through two rounds of PCR. The primers used in the primary PCR reaction are shown in Table 31 and the primers used in the secondary PCR reaction were

(forward, SEQ ID NO: 53)

AATGATACGGCGACCACCGAGATCTACACTCTTTCCCTACACG
and

(reverse, SEQ ID NO: 54)

CAAGCAGAAGACGGCATA.

TABLE 31
PCR primer sequences

| | Cas RNA | | | SEQ |
|---|---|---|---|---|
| Target | System | Primer | | ID |
| Site | Used | Orientation | Primary PCR Primer Sequence | NO: |
| LIGCas-1 | crRNA/ | Forward | CTACACTCTTTCCCTACACGACGCTCTTCC | 36 |
| | tracrRNA | | GATCTTCCTCTGTAACGATTTACGCACCTG | |
| | | | CTG | |
| LIGCas-1 | crRNA/ | Reverse | CAAGCAGAAGACGGCATACGAGCTCTTCC | 35 |
| | tracrRNA | | GATCTGCAAATGAGTAGCAGCGCACGTAT | |
| LIGCas-2 | crRNA/ | Forward | CTACACTCTTTCCCTACACGACGCTCTTCC | 449 |
| | tracrRNA | | GATCTGAAGCTGTAACGATTTACGCACCTG | |
| | | | CTG | |
| LIGCas-2 | crRNA/ | Reverse | CAAGCAGAAGACGGCATACGAGCTCTTCC | 35 |
| | tracrRNA | | GATCTGCAAATGAGTAGCAGCGCACGTAT | |
| LIGCas-3 | crRNA/ | Forward | CTACACTCTTTCCCTACACGACGCTCTTCC | 37 |
| | tracrRNA | | GATCTAAGGCGCAAATGAGTAGCAGCGCAC | |
| LIGCas-3 | crRNA/ | Reverse | CAAGCAGAAGACGGCATACGAGCTCTTCC | 38 |
| | tracrRNA | | GATCTCACCTGCTGGGAATTGTACCGTA | |
| LIGCas-3 | Long | Forward | CTACACTCTTTCCCTACACGACGCTCTTCC | 450 |
| | guide | | GATCTTTCCCGCAAATGAGTAGCAGCGCAC | |
| | RNA | | | |
| LIGCas-3 | Long | Reverse | CAAGCAGAAGACGGCATACGAGCTCTTCC | 38 |
| | guide | | GATCTCACCTGCTGGGAATTGTACCGTA | |
| | RNA | | | |

[0595] The resulting PCR amplifications were purified with a Qiagen PCR purification spin column, concentration measured with a Hoechst dye-based fluorometric assay, combined in an equimolar ratio, and single read 100 nucleotide-length deep sequencing was performed on IIlumina's MiSeq Personal Sequencer with a 30-40% (v/v) spike of PhiX control v3 (Illumina, FC-110-3001) to off-set sequence bias. Only those reads with a ≧1 nucleotide indel arising within the 10 nucleotide window centered over the expected site of cleavage and not found in a similar level in the negative control were classified as NHEJ mutations. NHEJ mutant reads with the same mutation were counted and collapsed into a single read and the top 10 most prevalent mutations were visually confirmed as arising within the expected site of cleavage. The total numbers of visually confirmed NHEJ mutations were then used to calculate the % mutant reads based on the total number of reads of an appropriate length containing a perfect match to the barcode and forward primer.

[0596] The frequency of NHEJ mutations recovered by deep sequencing for the crRNA/tracrRNA/Cas endonuclease system targeting the three LIGCas targets (SEQ ID NOS: 16, 17, 18) compared to the long guide RNA/Cas endonuclease system targeting the same locus is shown in Table 32.

TABLE 32
Percent (%) mutant reads at maize Liguleless 1 target locus produced by
crRNA/tracrRNA/Cas endonuclease system compared to the long guide
RNA/Cas endonuclease system

| | Total Number of | Number of Mutant | % Mutant |
|---|---|---|---|
| System | Reads | Reads | Reads |
| Cas9 Only Control | 1,744,427 | 0 | 0.00% |
| LIGCas-3 long | 1,596,955 | 35,300 | 2.21% |
| guide RNA | | | |
| LIGCas-1 | 1,803,163 | 4,331 | 0.24% |
| crRNA/tracrRNA | | | |
| LIGCas-2 | 1,648,743 | 3,290 | 0.20% |
| crRNA/tracrRNA | | | |
| LIGCas-3 | 1,681,130 | 2,409 | 0.14% |
| crRNA/tracrRNA | | | |

[0597] The ten most prevalent types of NHEJ mutations recovered based on the crRNA/tracrRNA/Cas endonuclease system are shown in FIG. 27A (for LIGCas-1 target site, corresponding to SEQ ID NOs:415-424), FIG. 27B (for LIGCas-2 target site corresponding to SEQ ID NOs: 425-434) and FIG. 27C (for LIGCas-3 target site corresponding to SEQ ID NOs:435-444). Approximately, 9-16 fold lower frequencies of NHEJ mutations were observed when using a crRNA/tracrRNA/Cas endonuclease system to introduce a double strand break at a maize genomic target site, relative to the long guide RNA/Cas endonuclease system control.

[0598] Taken together, our data indicate that the maize optimized crRNA/tracrRNA/Cas endonuclease system described herein cleaves maize chromosomal DNA and generates imperfect NHEJ mutations.

### Example 23

### Modifying the ARGOS8 Gene to Improve Drought Tolerance and Nitrogen Use Efficiency in Maize Plants

[0599] ARGOS is a negative regulator for ethylene responses in plants (WO 2013/066805 A1, published 10 May 2013). ARGOS proteins target the ethylene signal transduction pathway. When over-expressed in maize plants, ARGOS reduces plant sensitivity to ethylene and promotes organ growth, leading to increased drought tolerance (DRT) and improved nitrogen use efficiency (NUE) ((WO 2013/066805 A1, published 10 May 2013). To achieve optimal ethylene sensitivity, promoters have been tested for driving Zm-ARGOS8 over-expression in transgenic maize plants. Field trials showed that a maize promoter, Zm-GOS2 PRO:GOS2 INTRON (SEQ ID NO:460, U.S. Pat. No. 6,504,083 patent issued on Jan. 7, 2003; Zm-GOS2 is a maize homologous gene of rice GOS2. Rice GOS2 stands for Gene from Oryza Sativa 2), provided a favorable expression level and tissue coverage for Zm-ARGOS8 and the transgenic plants have a higher grain yield than non-transgenic controls under drought stress and low nitrogen conditions (WO 2013/066805 A1, published 10 May 2013). However, these transgenic plants contain two ARGOS8 genes, the endogenous gene and the transgene. ARGOS8 protein levels, therefore, are determined by these two genes. Because the endogenous ARGOS8 gene varies in sequence and the expression level among different inbred lines, the ARGOS8 protein level will be different when the transgene is integrated into different inbreds. Here we present a mutagenization (gene editing) method to modify the promoter region of the endogenous ARGOS8 gene to attain desired expression patterns and eliminate the need for a transgene.

[0600] The promoter Zm-GOS2 PRO:GOS2 INTRON (SEQ ID NO:460; U.S. Pat. No. 6,504,083 patent issued on Jan. 7, 2003) was inserted into the 5′-UTR of Zm-ARGOS8 (SEQ ID NO:462) by using a guideRNA/Cas9 system. The Zm-GOS2 PRO:GOS2 INTRON fragment also included a primer binding site (SEQ ID NO:459) at its 5′ end to facilitate event screening with PCR. We also substituted the native promoter of Zm-ARGOS8 (SEQ ID NO:461) with Zm-GOS2 PRO::GOS2 INTRON (SEQ ID NO:460). Resulted maize lines carry a new ARGOS8 allele whose expression levels and tissue specificity will differ from the native form. We expect that these lines will recapitulate the phenotype of increased drought tolerance and improved NUE as observed in the Zm-GOS2 PRO:Zm-ARGOS8 transgenic plants (WO 2013/066805 A1, published 10 May 2013). These maize lines are different from those conventional transgenic events: (1) there is only one ARGOS8 gene in the genome; (2) this modified version of Zm-ARGOS8 resides at its native locus; (3) the ARGOS8 protein level and the tissue specificity of gene expression are entirely controlled by the edited allele. The DNA reagents used during the mutagenization, such as guideRNA, Cas9endonuclease, transformation selection marker and other DNA fragments are not required for function of the newly generated ARGOS8 allele and can be eliminated from the genome by segregation through standard breeding methods. Because the promoter Zm-GOS2 PRO:GOS2 INTRON was copied from maize GOS2 gene (SEQ ID NO:464) and inserted into the ARGOS8 locus through homologous recombination, this ARGOS8 allele is indistinguishable from natural mutant alleles.

A. Insertion of Zea mays-GOS2 PRO:GOS2 INTRON into Maize-ARGOS 8 Promoter

[0601] To insert Zm-GOS2 PRO:GOS2 INTRON into the 5′-UTR of maize ARGOS8 gene, a guideRNA construct, gRNA1, was made using maize U6 promoter and terminator as described herein. The 5′-end of the guide RNA contained a 19-bp variable targeting domain targeting the genomic target sequence 1 (CTS1; SEQ ID NO; 451) in the 5′-UTR of Zm-ARGOS8 (FIG. 28). A polynucleotide modification template containing the Zm-GOS2 PRO:GOS2 INTRON that was flanked by two genomic DNA fragments (HR1 and HR2, 370 and 430-bp in length, respectively) derived from the upstream and downstream region of the CTS1 (FIG. 28). The gRNA1 construct, the polynucleotide modification template, a Cas9 cassette and transformation selection marker phosphomannose isomerase (PMI) were introduced into maize immature embryo cells by using a particle bombardment method. PMI-resistant calli were screened with PCR for Zm-GOS2 PRO:GOS2 INTRON insertion (FIGS. 29A and 29B). Multiple callus events were identified and plants were regenerated. The insertion events were confirmed by amplifying the Zm-ARGOS8 region in T0 plants with PCR (FIG. 29C) and sequencing the PCR products.

B. Replacement of Zm-ARGOS 8 Promoter with Zm-GOS2 PRO:GOS2 INTRON Promoter (Promoter Swap).

[0602] To substitute (replace) the native promoter of Zm-ARGOS8 with Zm-GOS2 PRO:GOS2 INTRON, a guide RNA construct, gRNA3, was made for targeting the genomic target site CTS3 (SEQ ID NO:453), located 710-bp upstream of the Zm-ARGOS8 start codon (FIG. 30). Another guide RNA, gRNA2, was designed to target the genomic target site CTS2 (SEQ ID NO:452) located in the 5′-UTR of Zm-ARGOSO8 (FIG. 30). The polynucleotide modification template contained a 400-bp genomic DNA fragment derived from the upstream region of CTS3, Zm-GOS2 PRO:GOS2 INTRON and a 360-bp genomic DNA fragment derived from the downstream region of CTS2 (FIG. 30). The gRNA3 and gRNA2, the Cas9 cassette, the polynucleotide modification template and the PMI selection marker were used to transform immature embryo cells. Multiple promoter swap (promoter replacement) events were identified by PCR screening of the PMI-resistance calli (FIGS. 31A, 31B & 31C) and plants were regenerated. The swap events were confirmed by PCR analysis of the Zm-ARGOS8 region in T0 plants (FIG. 31 D).

### C. Deletion of Zm-ARGOS 8 Promoter

[0603] To delete the promoter of Zm-ARGOS8, we screened the PMI-resistance calli obtained from the above gRNA3/gRNA2 experiment to look for events that produce a 1.1-kb PCR product (FIG. 32A). Multiple deletion events were identified (FIG. 32B) and plants were regenerated. The deletion events were confirmed by amplifying the Zm-ARGOS8 region in T0 plants with PCR and sequencing of the PCR products.

### Example 24

### Gene Editing of the Soybean EPSPS1 Gene Using the Guide RNA/Cas Endonuclease System

[0604] A. guideRNA/Cas9 Endonuclease Target Site Design on the Soybean EPSPS Genes.

[0605] Two guideRNA/Cas9 endonuclease target sites (soy EPSPS-CR1 and soy EPSPS-CR2) were identified in the Exon2 of the soybean EPSPS1 gene Glyma01g33660 (Table 33).

TABLE 33
Guide RNA/Cas9 endonuclease target sites on soybean EPSPS1 gene

| | Cas | |
|---|---|---|
| | endonuclease | |
| Name of gRNA-Cas9 | target | |
| endonuclease | sequence | |
| target site | (SEQ ID NO:) | Physical location |
| soy EPSPS-CR1 | 467 | Gm01: 45865337 . . . 45865315 |
| soy EPSPS-CR2 | 468 | Gm01: 45865311 . . . 45865333 |

### B. Guide-RNA Expression Cassettes, Cas9 Endonuclease Expression Cassettes and Polynucleotide Modification Templates for Introduction of Specific Amino Acid Changes in the Soybean EPSPS1 Gene

[0606] The soybean U6 small nuclear RNA promoter, GM-U6-13.1 (SEQ ID. NO: 469), was used to express guide RNAs to direct Cas9 nuclease to designated genomic target sites (Table 34). A soybean codon optimized Cas9 endonuclease (SEQ ID NO: 489) expression cassette and a guide RNA expression cassette were linked in a first plasmid that was co-delivered with a polynucleotide modification template. The polynucleotide modification template contained specific nucleotide changes that encoded for amino acid changes in the EPSPS1 polypeptide (Glyma01g33660), such as the T183I and P187S (TIPS) in the Exon2. Other amino acid changes in the EPSPS1 polypeptide can also be obtained using the guide RNA/Cas endonuclease system described herein. Specific amino acid modifications can be achieved by homologous recombination between the genomic DNA and the polynucleotide modification template facilitated by the guideRNA/Cas endonuclease system.

TABLE 34
Guide RNA/Cas9 expression cassettes and polynucleotide modification
templates used in soybean stable transformation for the specific amino
acid modifications of the EPSPS1 gene.

| | | | polynucleotide | |
|---|---|---|---|---|
| | Guide RNA/Cas9 | SEQ ID | modification | SEQ ID |
| Experiment | (plasmid name) | NO: | template | NO: |
| soy EPSPS- | U6-13.1:EPSPS CR1 + | 470 | RTW1013A | 472 |
| CR1 | EF1A2:CAS9 | | | |
| | (QC878) | | | |
| soy EPSPS- | U6-13.1:EPSPS CR2 + | 471 | RTW1012A | 473 |
| CR2 | EF1A2:CAS9 | | | |
| | (QC879) | | | |

### C. Detection of Site-Specific Non-Homologous-End-Joining (NHEJ) Mediated by the Guide RNA/Cas9 System in Stably Transformed Soybean

[0607] Genomic DNA was extracted from somatic embryo samples and analyzed by quantitative PCR using a 7500 real time PCR system (Applied Biosystems, Foster City, Calif.) with target site-specific primers and FAM-labeled fluorescence probe to check copy number changes of the double strand break target sites. The qPCR analysis was done in duplex reactions with a syringolide induced protein (SIP) as the endogenous controls and a wild type 93B86 genomic DNA sample that contains one copy of the target site with 2 alleles, as the single copy calibrator. The presence or absence of the guide RNA—Cas9 expression cassette in the transgenic events was also analyzed with the qPCR primer/probes for guideRNA/Cas9 (SEQ IDs: 477-479) and for PinII (SEQ ID: 480-482). The qPCR primers/probes are listed in Table 35.

TABLE 35
Primers/Probes used in qPCR analyses of transgenic soybean
events.

| | | | SEQ ID |
|---|---|---|---|
| Target Site | Primer/Probe Name | Sequences | NOs: |
| EPSPS-CR1 & | Soy1-F1 | CCACTAGTAAGGAATCTAAAGATGAA | 474 |
| EPSPS-CR2 | | ATCA | |
| | Soy1-R2 | CCTGCAGCAACCACAGCTGCTGTC | 475 |
| | Soy1-T1 (FAM-MGB) | CTGCAATGCGTCCTT | 476 |
| gRNA/CAS9 | Cas9-F | CCTTCTTCCACCGCCTTGA | 477 |
| | Cas9-R | TGGGTGTCTCTCGTGCTTTTT | 478 |
| | Cas9-T (FAM-MGB) | AATCATTCCTGGTGGAGGA | 479 |
| pINII | pINII-99F | TGATGCCCACATTATAGTGATTAGC | 480 |
| | pINII-13R | CATCTTCTGGATTGGCCAACTT | 481 |
| | pINII-69T (FAM-MGB) | ACTATGTGTGCATCCTT | 482 |
| SIP | SIP-130F | TTCAAGTTGGGCTTTTTCAGAAG | 483 |
| | SIP-198R | TCTCCTTGGTGCTCTCATCACA | 484 |
| | SIP-170T (VIC-MGB) | CTGCAGCAGAACCAA | 485 |

[0608] The endogenous control probe SIP-T was labeled with VIC and the gene-specific probes for all the target sites were labeled with FAM for the simultaneous detection of both fluorescent probes (Applied Biosystems). PCR reaction data were captured and analyzed using the sequence detection software provided with the 7500 real time PCR system and the gene copy numbers were calculated using the relative quantification methodology (Applied Biosystems).

[0609] Since the wild type 93B86 genomic DNA with two alleles of the double strand break target site was used as the single copy calibrator, events without any change of the target site would be detected as one copy herein termed Wt-Homo (qPCR value >=0.7), events with one allele changed, which is no longer detectible by the target site-specific qPCR, would be detected as half copy herein termed NHEJ-Hemi (qPCR value between 0.1 and 0.7), while events with both alleles changed would be detected as null herein termed NHEJ-Null (qPCR value=<0.1). As shown in Table 36, both guideRNA/Cas endonuclease systems targeting the soy EPSPS-CR1 and EPSPS-CR2 sites can introduce efficient Double Strand Break (DSB) efficiency at their designed target sites. Both NHEJ-Hemi and NHEJ-Null were detected in the 93B86 genotype. NHEJ (Non-Homologous-End-Joining) mutations mediated by the guide RNA/Cas9 system at the specific Cas9 target sites were confirmed by PCR/topo cloning/sequencing.

TABLE 36
Target Site Double Strand Break Rate Mutations Induced by the Guide
RNA/Cas9 system on soybean EPSPS1 gene. Numbers indicate no.
of events (numbers in parentheses are %).

| | Total | | | |
|---|---|---|---|---|
| Project | event | Wt-Homo (%) | NHEJ-Hemi (%) | NHEJ-Null (%) |
| U6-13.1 | 168 | 63 (38%) | 66 (39%) | 39 (23%) |
| EPSPS-CR1 | | | | |
| U6-13.1 | 111 | 50 (45%) | 21 (19%) | 40 (36%) |
| EPSPS-CR2 | | | | |

### D. Detection of the TIPS Mutation in the Soybean EPSPS Gene

[0610] In order to edit specific amino acids at the native EPSPS gene (such as those resulting in a TIPS modification), a polynucleotide modification template, such as RTW1013A or RTW1012A (Table 34), was co-delivered with the guideRNA/Cas9 expression cassettes into soybean cells.

[0611] The modification of the native EPSPS1 gene via guide RNA/Cas9 system mediated DNA homologous recombination was determined by specific PCR analysis. A specific PCR assay with primer pair WOL569 (SEQ ID NO: 486) and WOL876 (SEQ ID NO: 487) was used to detect perfect TIPS modification at the native EPSPS1 gene. A second primer pair WOL569 (SEQ ID NO: 486) and

[0612] WOL570 (SEQ ID NO: 488) was used to amplify both TIPS modified EPSPS1 allele and WT (wild type)/NHEJ mutated allele. Topo cloning/sequencing was used to verify the sequences.

### Example 25

### Intron Replacement of Soybean Genes Using the guideRNA/Cas Endonuclease System

[0613] A. guideRNA/Cas9 Endonuclease Target Site Design.

[0614] Four guideRNA/Cas9 endonuclease target sites were identified in the soybean EPSPS1 gene Glyma01g33660 (Table 37). Two of the target sites (soy EPSPS-CR1 and soy EPSPS-CR2) were identified to target the Exon2 of the soybean EPSPS gene as described in Example 24. Another two target sites (soy EPSPS-CR4 and soy EPSPS-CR5) were designed near the 5′ end of the intron1 of the soybean EPSPS gene.

TABLE 37
Guide RNA/Cas9 endonuclease target sites on soybean EPSPS1 gene.

| | Cas | |
|---|---|---|
| | endonuclease | |
| | target | |
| Name of gRNA-Cas9 | sequence | |
| endonuclease target site | (SEQ ID NO:) | Physical location |
| soy EPSPS-CR1 | 467 | Gm01: 45865337..45865315 |
| soy EPSPS-CR2 | 468 | Gm01: 45865311..45865333 |
| soy EPSPS-CR4 | 490 | Gm01: 45866302..45866280 |
| soy EPSPS-CR5 | 491 | Gm01: 45866295..45866274 |

B. Guide RNA/Cas9 Endonuclease Expression Cassettes and Polynucleotide Modification Templates Used in Soybean Stable Transformation for the Replacement of the Intron 1 of the Soybean EPSPS 1 Gene with the Soybean Ubiquitin (UBQ) Intron 1

[0615] The soybean U6 small nuclear RNA promoter GM-U6-13.1 (SEQ ID. NO: 469) was used to express two guide RNAs (soy-EPSPS-CR1 and soy-EPSPS-CR4, or soy-EPSPS-CR1 and soy-EPSPS-CR5) to direct Cas9 endonuclease to designated genomic target sites (Table 38). One of the target sites (soy-EPSPS-CR1) was located in the exon2, as described in Example 24, and a second target site (soy-EPSPS-CR4 or soy-EPSPS-CR5) was located near the 5′ end of intron1 of the native EPSPS1 gene. A soybean codon optimized Cas9 endonuclease expression cassette and a guide RNA expression cassette were linked in the expression plasmids QC878/RTW1199 (SEQ ID NO:470/492) or QC878/RTW1200 (SEQ ID NO:470/493) that was co-delivered with a polynucleotide modification template. The polynucleotide modification template, RTW1190A (SEQ ID NO:494), contained 532 bp intron1 of the soybean UBQ gene and the TIPS modified Exon2. Soybean EPSPS1 intron 1 replacement with the soybean UBQ intron1 can be achieved with the guide RNA/Cas system by homologous recombination between the genomic DNA and the polynucleotide modification template, resulting in enhancement of the native or modified soy EPSPS1 gene expression.

TABLE 38
Guide RNA/Cas9 endonuclease expression cassettes and polynucleotide
modification templates used in soybean stable transformation for the
replacement of the Intron1 of the soybean EPSPS1 gene with the
soybean ubiquitin (UBQ) intron1

| | | | poly- | |
|---|---|---|---|---|
| | | | nucleotide | SEQ |
| | | SEQ ID | modification | ID |
| Experiment | Guide RNA/Cas9 | NO: | template | NO: |
| soy EPSPS-CR1 | U6-13.1:EPSPS CR1 + | 470/492 | RTW1190A | 494 |
| and | CR4 + EF1A2:CAS9 | | | |
| soy EPSPS-CR4 | (QC878/RTW1199) | | | |
| soy EPSPS-CR1 | U6-13.1:EPSPS CR1 + | 470/493 | RTW1190A | 494 |
| and | CR5 + EF1A2:CAS9 | | | |
| soy EPSPS-CR5 | (QC878/RTW1200) | | | |

### C. Detection of Site-Specific NHEJ Mediated by the Guide RNA/Cas9 System in Stably Transformed Soybean

[0616] Site-specific NHEJ was detected as described in Example 24 C, using the qPCR primers/probes listed in Table 39.

TABLE 39
Primers/Probes used in qPCR analyses of transgenic
soybean events.

| | | | SEQ ID |
|---|---|---|---|
| Target Site | Primer/Probe Name | Sequences | NOs: |
| EPSPS-CR1 & | Soy1-F1 | CCACTAGTAAGGAATCTAAAGATGA | 474 |
| EPSPS-CR2 | | AATCA | |
| | Soy1-R2 | CCTGCAGCAACCACAGCTGCTGTC | 475 |
| | Soy1-T1 (FAM-MGB) | CTGCAATGCGTCCTT | 476 |
| EPSPS-CR4 | Soy1-F3 | GTTTGTTTGTTGTTGGGTGTGGG | 495 |
| | Soy1-R3 | GACATGATGCTTCATTTTCACAGAA | 496 |
| | Soy-T2 (FAM-MGB) | TGTGTAGAGTGGATTTTG | 497 |
| EPSPS-CR5 | Soy1-F2 | TGTTGTTGGGTGTGGGAATAGG | 498 |
| | Soy1-R3 | GACATGATGCTTCATTTTCACAGAA | 496 |
| | Soy1-T2 (FAM-MGB) | TGTGTAGAGTGGATTTTG | 497 |
| gRNA/CAS9 | Cas9-F | CCTTCTTCCACCGCCTTGA | 477 |
| | Cas9-R | TGGGTGTCTCTCGTGCTTTTT | 478 |
| | Cas9-T (FAM-MGB) | AATCATTCCTGGTGGAGGA | 479 |
| pINII | pINII-99F | TGATGCCCACATTATAGTGATTAGC | 480 |
| | pINII-13R | CATCTTCTGGATTGGCCAACTT | 481 |
| | pINII-69T (FAM-MGB) | ACTATGTGTGCATCCTT | 482 |
| SIP | SIP-130F | TTCAAGTTGGGCTTTTTCAGAAG | 483 |
| | SIP-198R | TCTCCTTGGTGCTCTCATCACA | 484 |
| | SIP-170T (VIC-MGB) | CTGCAGCAGAACCAA | 485 |

D. Detection of the Replacement of the Soybean EPSPS 1 Intron 1 with the Soybean UBQ Intron 1 Using the Guide RNA/Cas9 Endonuclease System.

[0617] In order to replace the soybean EPSPS1 intron1 with the soybean UBQ intron1 at the native EPSPS1 gene, two guideRNA expression vectors were used as shown in Table 38. The QC878 vector (SEQ ID NO: 470) was targeting the exon2 and the RTW1199 (SEQ ID NO:492) or RTW1200 (SEQ ID NO:493) was targeting the 5′ end of the intron1. The double cleavage of soybean EPSPS gene with the two guide RNA/Cas systems resulted in the removal of the native EPSPS1 intron1/partial Exon2 fragment. At the same time, a polynucleotide modification template RTW1190A (SEQ ID NO:494) was co-delivered into soybean cells and homologous recombination between the polynucleotide modification template and the genomic DNA resulted in the replacement of EPSPS1 intron1 with the soybean UBQ intronland the desired amino acid modifications in exon2 as evidenced by PCR analysis. PCR assays with primer WOL1001/WOL1002 pair (SEQ ID NO: 499 and 500) and WOL1003/WOL1004 pair (SEQ ID NO: 501 and 502) were used to detect the intron replacement events.

### Example 26

### Promoter Replacement (Promoter Swap) of Soybean Genes Using the guideRNA/Cas Endonuclease System

[0618] A. guideRNA/Cas9 Endonuclease Target Site Design.

[0619] Four guideRNA/Cas9 endonuclease target sites were identified in the soybean EPSPS1 gene Glyma01g33660 (Table 40). Two of the target sites (soy EPSPS-CR1 and soy EPSPS-CR2) were identified to target the Exon2 of the soybean EPSPS gene as described in Example 24. The soy EPSPS-CR6 and soy EPSPS-CR7 were identified near the 5′ end of the −798 bp of the native EPSPS promoter.

TABLE 40
Guide RNA/Cas9 endonuclease target sites on soybean EPSPS1 gene.

| | Cas | |
|---|---|---|
| | endonuclease | |
| Name of gRNA-Cas9 | target sequence | |
| endonuclease target site | (SEQ ID NO:) | Physical location |
| soy EPSPS-CR1 | 467 | Gm01: 45865337..45865315 |
| soy EPSPS-CR2 | 468 | Gm01: 45865311..45865333 |
| soy EPSPS-CR6 | 503 | Gm01: 45867471..45867493 |
| soy EPSPS-CR7 | 504 | Gm01: 45867459..45867481 |

B. Guide RNA/Cas9 Endonuclease Expression Cassettes and Polynucleotide Modification Templates Used in Soybean Stable Transformation for the Replacement of the −798 bp Soybean EPSPS1 Promoter with the Soybean UBQ Promoter.

[0620] The soybean U6 small nuclear RNA promoter GM-U6-13.1 (SEQ ID. NO: 469) was used to express two guide RNAs (soyEPSPS-CR1 and soyEPSPS-CR6, or soyEPSPS-CR1 and soyEPSPS-CR7) to direct Cas9 nuclease to designated genomic target sites (Table 41). One of the target sites (soy-EPSPS-CR1) was located in the exon2 as described in Example 24 and a second target site (soy-EPSPS-CR6 or soy-EPSPS-CR7) was located near 5′ end of the −798 bp of the native EPSPS1 promoter. A soybean codon optimized Cas9 endonuclease expression cassette and a guide RNA expression cassette were linked in the expression plasmids QC878/RTW1201 (SEQ ID NO:470/505) or QC878/RTW1202 (SEQ ID NO:470/506) that was co-delivered with a polynucleotide modification template, RTW1192A (SEQ ID NO:507). The polynucleotide modification template contained 1369 bp of the soybean UBQ gene promoter, 47 bp 5UTR and 532 bp UBQ intron1. Specific soybean EPSPS1 promoter replacement with the soybean UBQ promoter can be achieved with the guide RNA/Cas system by homologous recombination between the genomic DNA and the polynucleotide modification template, resulting enhancement of the native or modified soy EPSPS1 gene expression

TABLE 41
Guide RNA/Cas9 endonuclease expression cassettes and
polynucleotide modification templates used in soybean stable
transformation for the replacement of the −798 bp soybean
EPSPS1 promoter with the soybean UBQ promoter

| | | SEQ | polynucleotide | SEQ |
|---|---|---|---|---|
| | | ID | modification | ID |
| Experiment | Guide RNA/Cas9 | NO: | template | NO: |
| soy EPSPS-CR1 | U6-13.1:EPSPS CR1 + | 470, | RTW1192A | 507 |
| and | CR6 + EF1A2:CAS9 | 505 | | |
| soy EPSPS-CR6 | (QC878/RTW1201) | | | |
| soy EPSPS-CR1 | U6-13.1:EPSPS CR1 + | 470, | RTW1192A | 507 |
| and | CR7 + EF1A2:CAS9 | 506 | | |
| soy EPSPS-CR7 | (QC878/RTW1202) | | | |

### C. Detection of Site-Specific NHEJ Mediated by the Guide RNA/Cas9 System in Stably Transformed Soybean

[0621] Site-specific NHEJ was detected as described in Example 24 C, using the qPCR primers/probes listed in Table 42.

TABLE 42
Primers/Probes used in qPCR analyses of transgenic
soybean events

| | | | SEQ |
|---|---|---|---|
| | | | ID |
| Target Site | Primer/Probe Name | Sequences | NOs: |
| EPSPS-CR1 & | Soy1-F1 | CCACTAGTAAGGAATCTAAAGATGAA | 474 |
| EPSPS-CR12 | | ATCA | |
| | Soy1-R2 | CCTGCAGCAACCACAGCTGCTGTC | 475 |
| | Soy1-T1 (FAM-MGB) | CTGCAATGCGTCCTT | 476 |
| EPSPS-CR6 & | Soy1-F4 | TCAATAATACTACTCTCTTAGACACCA | 508 |
| EPSPS-CR7 | | AACAA | |
| | Soy1-R4 | CAAGGAAAATGAATGATGGCTTT | 509 |
| | Soy1-T3 (FAM-MGB) | CCTTCCCAAACTATAATC | 510 |
| gRNA/CAS9 | Cas9-F | CCTTCTTCCACCGCCTTGA | 477 |
| | Cas9-R | TGGGTGTCTCTCGTGCTTTTT | 478 |
| | Cas9-T (FAM-MGB) | AATCATTCCTGGTGGAGGA | 479 |
| pINII | pINII-99F | TGATGCCCACATTATAGTGATTAGC | 480 |
| | pINII-13R | CATCTTCTGGATTGGCCAACTT | 481 |
| | pINII-69T (FAM- | ACTATGTGTGCATCCTT | 482 |
| | MGB) | | |
| SIP | SIP-130F | TTCAAGTTGGGCTTTTTCAGAAG | 483 |
| | SIP-198R | TCTCCTTGGTGCTCTCATCACA | 484 |
| | SIP-170T (VIC-MGB) | CTGCAGCAGAACCAA | 485 |

D. Detection of the Promoter Replacement of the Soybean EPSPS 1 Promoter with the Soybean UBQ Promoter Using the Guide RNA/Cas9 Endonuclease System.

[0622] In order to replace the soybean EPSPS1 promoter with the soybean UBQ promoter at the native EPSPS1 gene, two guideRNA expression vectors were used in each soybean transformation experiment as shown in Table 41. The QC878 (SEQ ID NO: 470) was targeting the exon2 and the RTW1201(SEQ ID NO: 505) or RTW1202 (SEQ ID NO: 506) was targeting the 5′ end of the soybean −798 bp promoter. The double cleavage of the soybean EPSPS1 gene with the two guide RNA/Cas systems resulted in removal of the native EPSPS1 promoter/5′UTR-Exon1/Intron1/partial Exon2 fragment at the native EPSPS gene. At the same time, a polynucleotide modification template RTW1192A (SEQ ID NO: 507) was co-delivered into soybean cells. This RTW1192A DNA contained 1369 bp soybean UBQ promoter, its 47 bp 5-UTR and 532 bp UBQ intron1 in front of the EPSPS1 exon1-Intron1-modified Exon2. Homologous recombination between the polynucleotide modification template and the genomic DNA resulted in the replacement of EPSPS1 promoter/5′UTR with the soybean UBQ promoter/5′UTR/Intron1 and the desired amino acid modifications evidenced by PCR analysis. PCR assays with primer WOL1005/WOL1006 pair (SEQ ID NO: 511 and 512) and WOL1003/WOL1004 pair (SEQ ID NO: 501 and 502) were used to detect the promoter replacement events.

### Example 27

### Enhancer Element Deletions Using the guideRNA/Cas Endonuclease System

[0623] The guide RNA/Cas endonuclease system described herein can be used to allow for the deletion of a promoter element from either a transgenic (pre-existing, artificial) or endogenous gene. Promoter elements, such enhancer elements, or often introduced in promoters driving gene expression cassettes in multiple copies (3×=3 copies of enhancer element, FIG. 33) for trait gene testing or to produce transgenic plants expressing specific trait. Enhancer elements can be, but are not limited to, a 35S enhancer element (Benfey et al, EMBO J, August 1989; 8(8): 2195-2202, SEQ ID NO:513). In some plants (events), the enhancer elements can cause an unwanted phenotype, a yield drag, or a change in expression pattern of the trait of interest that is not desired. For example, as shown in FIG. 33, a plant comprising multiple enhancer elements (3 copies, 3×) in its genomic DNA located between two trait cassettes (Trait A en Trait B) was characterized to show an unwanted phenotype. It is desired to remove the extra copies of the enhancer element while keeping the trait gene cassettes intact at their integrated genomic location. The guide RNA/Cas endonuclease system described herein can be used to removing the unwanted enhancing element from the plant genome. A guide RNA can be designed to contain a variable targeting region targeting a target site sequence of 12-30 bps adjacent to a NGG (PAM) in the enhancer. If a Cas endonuclease target site sequence is present in all copies of the enhancer elements (such as the three Cas endonuclease target sites 35S-CRTS1 (SEQ ID NO:514), 35S-CRTS2 (SEQ ID NO:515), 35S-CRTS3 (SEQ ID NO:516)), only one guide RNA is needed to guide the Cas endonuclease to the target sites and induce a double strand break in all the enhancer elements at once. The Cas endonuclease can make cleavage to remove one or multiple enhancers. The guideRNA/Cas endonuclease system can introduced by either agrobacterium or particle gun bombardment. Alternatively, two different guide RNAs (targeting two different genomic target sites) can be used to remove all 3× enhancer elements from the genome of an organism, in a manner similar to the removal of a (transgenic or endogenous) promoter described herein.

### Example 28

### Regulatory Sequence Modifications Using the Guide RNA/Cas Endonuclease System

### A. Modification of Polyubiquitination Sites

[0624] There are defined ubiquitination sites on proteins to be degraded and they were found within the maize EPSPS protein by using dedicated computer programs (for example, the CKSAAP_UbSite (Ziding Zhang's Laboratory of Protein Bioinformatics College of Biological Sciences, China Agricultural University, 100193 Beijing, China). One of the selected polyubiquitination site within the maize EPSPS coding sequence is shown in FIG. 34A and its amino acid signature sequence is compared to the equivalent EPSPS sites from the other plants (FIG. 34A). The lysine amino acid (K) at position 90 (highly conserved in other plant species) was selected as a potential site of the EPSPS protein polyubiquitination. The polynucleotide modification template (referred to as EPSPS polynucleotide maize K90R template) used to edit the epsps locus is listed as SEQ ID NO: 517. This template allowed for editing the epsps locus to contain the lysine (K) to arginine (R) substitution at position 90 (K90R) and two additional TIPS substitutions at positions 102 and 106 (FIGS. 34B and 34C). Maize genomic DNA was edited using the guideRNA/Cas endonuclease system described herein and T0 plants were produced as described herein. The T0 plants that contained the nucleotide modifications, as specified by the information provided on the K90R template (FIG. 34C), were selected by the genotyping methods described herein. F1 EPSPS-K90R plants can be selected for elevated protein content due to a slower rate of the EPSPS protein degradation.

### B. Editing Intron Elements to Introduce Intron Mediated Enhancer Elements (IMEs)

[0625] Transcriptional activity of the native EPSPS gene can be modulated by transcriptional enhancers positioned in the vicinity of other transcription controlling elements. Introns are known to contain enhancer elements affecting the overall rate of transcription from native promoters including the EPSPS promoter. For example, the first intron of the maize ubiquitin 5′UTR confers a high level of expression in monocot plants as specified in the WO 2011/156535 A1 patent application. An intron enhancing motif CATATCTG (FIG. 35 A), also referred to as a intron-mediated enhancer element, IME) was identified by proprietary analysis (WO2011/156535 A1, published on Dec. 15, 2011) and appropriate nucleotide sites at the 5′ end of the EPSPS first intron were selected for editing in order to introduce the intron-mediated enhancer elements (IMEs) (FIG. 35B-35C). The polynucleotide modification template (referred to as EPSPS polynucleotide maize IME template) is listed as SEQ ID No: 518. The polynucleotide modification template allows for editing of the epsps locus to contain three IMEs (two on one strand of the DNA, one on the reverse strand) in the first EPSPS intron and the TIPS substitutions at positions 102 and 106. The genomic DNA of maize plants was edited using the guideRNA/Cas endonuclease system described herein. Maize plants containing the IME edited EPSPS coding sequence can be selected by genotyping the T0 plants and can be further evaluated for elevated EPSPS-TIPS protein content due to the enhanced transcription rate of the native EPSPS gene.

### Example 29

### Modifications of Splicing Sites and/or Introducing Alternate Splicing Sites Using the Guide RNA/Cas Endonuclease System

[0626] In maize cells, the splicing process is affected by splicing sites at the exon-intron junction sites as illustrated in the EPSPS mRNA production (FIG. 36A-36B). FIG. 36A shows analysis of EPSPS amplified pre-mRNA (cDNA panel on left). Lane 14 in FIG. 36A shows amplification of the EPSPS pre-mRNA containing the 3^{rd} intron unspliced, resulting in a 804 bp diagnostic fragment indicative for an alternate splicing event. Lanes E3 and F8 show the EPSPS PCR amplified fragments resulting from regular spliced introns. Diagnostic fragments such as the 804 bp fragment of lane 14 are not amplified unless cDNA is synthesized (as is evident by the absence of bands in lanes E3, 14, and F8 comprising total RNA (shown in the total RNA panel on right of FIG. 36A). The canonical splice site in the maize EPSPS gene and genes from other species is AGGT, while other (alterative) variants of the splice sites may lead to the aberrant processing of pre-mRNA molecules. The EPSPS coding sequence contains a number of alternate splicing sites that may affect the overall efficiency of the pre-mRNA maturation process and as such may limit the EPSPS protein accumulation in maize cells.

[0627] In order to limit the occurrence of alternate splicing events during EPSPS gene expression, a guideRNA/Cas endonuclease system as described herein can be used to edit splicing sites. The splicing site at the junction of the second native EPSPS intron and the third exon is AGTT and can be edited in order to introduce the canonical AGGT splice site at this junction (FIG. 37). The T>G substitution does not affect the native EPSPS open reading frame and it does not change the EPSPS amino acid sequence. The polynucleotide modification template (referred to as EPSPS polynucleotide maize Tspliced template) is listed as SEQ ID NO: 519. This polynucleotide modification template allows for editing of the epsps locus to contain the canonical AGGT splice site at the 2^{nd} intron-3^{rd} exon junction site and the TIPS substitutions at positions 102 and 106. Maize plants are edited using the procedures described herein. F1 EPSPS-Tspliced maize plants can be evaluated for increased protein content due to the enhanced production of functional EPSPS mRNA messages.

### Example 30

### Shortening Maturity Via Manipulation of Early Flowering Phenotype with ZmRap2.7 Down-Regulation Using the Guide RNA/Cas Endonuclease System

[0628] Overall plant maturity can be shortened by modulating the flowering time phenotype of plants through modulation of a maize ZmRap2.7 gene. Shortening of plant maturity can be obtained by an early flowering phenotype.

[0629] RAP2.7 is an acronym for Related to APETALA 2.7. RAPL means RAP2.7 LIKE and RAP2.7 functions as an AP2-family transcription factor that suppresses floral transition (SEQ ID NOs:520 and 521). Transgenic phenotype upon silencing or knock-down of Rap2.7 resulted in early flowering, reduced plant height, but surprisingly developed normal ear and tassel as compared the wild-type plants (PCT/US14/26279 application, filed Mar. 13, 2014). The guide RNA/Cas endonuclease system described herein can be used to target and induce a double strand break at a Cas endonuclease target site located within the RAP2.7 gene. Plants comprising NHEJ within the RAP2.7 gene can be selected and evaluated for the presence of a shortened maturity phenotype.

### Example 31

### Modulating Expression of a Maize NPK1B Gene for Engineering Frost Tolerance in Maize Using a Guide RNA/Cas Endonuclease System

[0630] Nicotiana Protein Kinase1 (NPK1) is a mitogen activated protein kinase kinase kinase that is involved in cytokinesis regulation and oxidative stress signal transduction. The ZM-NPK1B (SEQ ID NO: 522 and SEQ ID NO: 523) which has about 70% amino acid similarity to rice NPKL3 has been tested for frost tolerance in maize seedlings and reproductive stages (PCT/US14/26279 application, filed Mar. 13, 2014). Transgenic seedlings and plants comprising a ZM-NPK1B driven by an inducible promoter Rab17, had significantly higher frost tolerance than control seedlings and control plants. The gene seemed inducted after cold acclimation and during −3° C. treatment period in most of the events but at low levels. (PCT/US14/26279 application, filed Mar. 13, 2014).

[0631] A guide RNA/Cas endonuclease system described herein can be used to replace the endogenous promoter of NPK1 gene, with a stress-inducible promoter such as the maize RAB17 promoter stages (SEQ ID NO: 524; PCT/US14/26279 application, filed Mar. 13, 2014), thus modulate NPK1B expression in a stress-responsive manner and provide frost tolerance to the modulated maize plants.

### Example 32

### Shortening Maturity Via Manipulation of Early Flowering Phenotype with FTM1 Expression Using a Guide RNA/Cas Endonuclease Systems

[0632] Overall plant maturity can shortened by modulating the flowering time phenotype of plants through expressing a transgene. Such a phenotype modification can also be achieved with additional transgenes or through a breeding approach.

[0633] FTM1 stands for Floral Transition MADS 1 transcription factor (SEQ ID NOs: 525 and 526). It is a MADS Box transcriptional factor and induces floral transition. Upon expression of FTM1 under a constitutive promoter, transgenic plants exhibited early flowering and shortened maturity, but surprisingly ear and tassel developed normally as compared to the wild-type plants (PCT/US14/26279 application, filed Mar. 13, 2014).

[0634] FTM1-expressing maize plants demonstrated that by manipulating a floral transition gene, time to flowering can be reduced significantly, leading to a shortened maturity for the plant. As maturity can be generally described as time from seeding to harvest, a shorter maturity is desired for ensuring that a crop can finish in the northern continental dry climatic environment (PCT/US14/26279 application, filed Mar. 13, 2014).

[0635] A guide RNA/Cas endonuclease system described herein can be used to introduce enhancer elements such as the CaMV35S enhancers (Benfey et al, EMBO J, August 1989; 8(8): 2195-2202, SEQ ID NO:512), specifically targeted in front of the endogenous promoter of FTM1, in order to enhance the expression of FTM1 while preserving most of the tissue and temporal specificities of native expression, providing shortened maturity to the modulated plants.

### Example 33

### Inserting Inducible Responsive Elements in Plant Genomes

[0636] Inducible expression systems controlled by an external stimulus are desirable for functional analysis of cellular proteins as well as trait development as changes in the expression level of the gene of interest can lead to an accompanying phenotype modification. Ideally such a system would not only mediate an “on/off” status for gene expression but would also permit limited expression of a gene at a defined level.

The guide RNA/Cas endonuclease system described herein can be used to introduce components of repressor/operator/inducer systems to regulate gene expression of an organism. Repressor/operator/inducer systems and their components are well known I the art (US 2003/0186281 published Oct. 2, 2003; U.S. Pat. No. 6,271,348). For example, nut not limited to, components of the tetracycline (Tc) resistance system of E. coli have been found to function in eukaryotic cells and have been used to regulate gene expression (U.S. Pat. No. 6,271,348). Nucleotide sequences of tet operators of different classes are known in the art see for example: classA, calssB, classC, classD, classE TET operator sequences listed as SEQ ID NOs:11-15 of U.S. Pat. No. 6,271,348.

[0637] Components of a sulfonylurea-responsive repressor system (as described in U.S. Pat. No. 8,257,956, issued on Sep. 4, 2012) can also be introduced into plant genomes to generate a repressor/operator/inducer systems into said plant where polypeptides can specifically bind to an operator, wherein the specific binding is regulated by a sulfonylurea compound.

### Example 34

### Genome Deletion for Trait Locus Characterization

[0638] Trait mapping in plant breeding often results in the detection of chromosomal regions housing one or more genes controlling expression of a trait of interest. For quantitative traits, expression of a trait of interest is governed by multiple quantitative trait loci (QTL) of varying effect-size, complexity, and statistical significance across one or more chromosomes. A QTL or haplotype that is associated with suppression of kernel-row number in the maize ear can be found to be endemic in elite breeding germ plasm. The negative effect of this QTL for kernel row number can be fine-mapped to an acceptable resolution to desire selective elimination of this negative QTL segment within specific recipient germplasm. Two flanking cut sites for the guide polynucleotide/Cas endonuclease system are designed via haplotype, marker, and/or DNA sequence context at the targeted QTL region, and the two guide polynucleotide/Cas endonuclease systems are deployed simultaneously or sequentially to produce the desired end product of two independent double strand breaks (cuts) that liberate the intervening region from the chromosome. Individuals harboring the desired deletion event would result by the NHEJ repair of the two chromosomal ends and eliminating the intervening DNA region. Assays to identify these individuals is based on the presence of flanking DNA marker regions, but absence of intervening DNA markers. A proprietary haplotype for kernel-row-number is created that is not extant in the previously defined elite breeding germplasm pool.

An alternative approach would be to delete a region containing a fluorescent gene. Recovery of plants with, and without, fluorescence would give an approximate indication of the efficiency of the deletion process.

### Example 35

### Engineering Drought Tolerance and Nitrogen Use Efficiency into Maize Via Gene Silencing by Expressing an Inverted Repeat into an ACS6 Gene Using the Guide RNA/Cas Endonuclease System

[0639] ACC (1-aminocyclopropane-1-carboxylic acid) synthase (ACS) genes encode enzymes that catalyze the rate limiting step in ethylene biosynthesis. A construct containing one of the maize ACS genes, ZM-ACS6, in an inverted repeat configuration, has been extensively tested for improved abiotic stress tolerance in maize (PCT/US2010/051358, filed Oct. 4, 2010; PCT/US2010/031008, filed Apr. 14, 2010). Multiple transgenic maize events containing a ZM-ACS6 RNAi sequence driven by a ubiquitin constitutive promoter had reduced ethylene emission, and a concomitant increase in grain yield relative to controls under both drought and low nitrogen field conditions (Plant Biotechnology Journal: 12 Mar. 2014, DOI: 10.1111/pbi.12172).

[0640] In an embodiment the insertion of the inverted gene fragment can result in the formation of an in-vivo created inverted repeat (hairpin) in a native (or modified) promoter of an ACS6 gene and/or in a native 5′ end of the native ACS6 gene. The inverted gene fragment can further comprise an intron which can result in an enhanced silencing of the targeted ethylene biosynthetic gene.

### Example 36

### T0 Plants from the Multiplexed Guide RNA/Cas Experiment Carried High Frequency of Bi-Allelic Mutations and Demonstrated Proper Inheritance of Mutagenized Alleles in the T1 Population

[0641] This example demonstrates the high efficiency of the guide RNA/Cas endonuclease system in generating maize plants with multiple mutagenized loci and their inheritance in the consecutive generation(s).

[0642] Mutated events generated in the multiplexed experiment described in Example 4 were used to regenerate T0 plants with mutations at 3 different target sites: MS26Cas-2 target site (SEQ ID NO: 14), LIGCas-3 target site (SEQ ID NO: 18) and MS45Cas-2 target site (SEQ ID NO: 20).

[0643] For further analysis, total genomic DNA was extracted from leaf tissue of individual T0 plants. Fragments spanning all 3 target sites were PCR amplified using primer pairs for the corresponding target sites, cloned into the pCR2.1-TOPO cloning vector (Invitrogen), and sequenced. Table 43 shows examples of mutations detected in four T0 plants resulting from imprecise NHEJ at all relevant loci when multiple guide RNA expression cassettes were simultaneously introduced either in duplex (see TS=Lig34/MS26) or triplex (see TS=Lig34/MS26/MS45), respectively.

TABLE 43
Examples of mutations at maize target loci produced by a multiplexed
guide RNA/Cas system

| Target sites | T0 | qPCR | Sequencing data | | |
|---|---|---|---|---|---|
| (TS) | plant | data | Lig3/4 TS | Ms26 TS | Ms45 TS |
| Lig34/MS26 | 1 | NULL/NULL* | 1 bp ins/2 bp | 1 bp ins/19 bp | |
| | | | del + 1 bp ins | del | |
| | 2 | NULL/NULL | 1 bp ins/1 bp del | 1 bp ins/1 bp | |
| | | | | ins | |
| Lig34/MS26/ | 1 | NULL/NULL/ | 1 bp ins/large | 1 bp ins/1 bp | 15 bp del/ |
| MS45 | | NULL | del | del | large del |
| | 2 | INDEL**/NULL/ | 1 bp ins/WT | 1 bp (T) ins/ | 1 bp ins/large |
| | | NULL | | 1 bp (C) ins | del |

*NULL indicates that both alleles are mutated
**INDEL indicates mutation in one of the two alleles.
del = deletion,
ins = insertion,
bp = base pair

[0644] All T0 plants were crossed with wild type maize plants to produce T1 seeds. T1 progeny plants (32 plants) of the second T0 plant from the triplex experiment (see Table 43, Lig34/MS26/MS45) were analyzed by sequencing to evaluate segregation frequencies of the mutated alleles. Our results demonstrated proper inheritance and expected (1:1) segregation of the mutated alleles as well as between mutated and wild type alleles at all three target sites.

[0645] The data clearly demonstrate that the guide RNA/maize optimized Cas endonuclease system described herein, can be used to simultaneously mutagenize multiple chromosomal loci and produce progeny plants containing the stably inherited multiple gene knock-outs.

### Example 37

### Guide RNA/Cas Endonuclease Mediated DNA Cleavage in Maize Chromosomal Loci can Stimulate Homologous Recombination Repair-Mediated Transgene Insertion and Resulting T1 Progeny Plants Demonstrated Proper Inheritance of the Modified Alleles

[0646] Maize events generated in the experiment described in Example 5 were used to regenerate T0 plants. T0 plants were regenerated from 7 independent callus events with correct amplifications across both transgene genomic DNA junctions and analyzed. Leaf tissue was sampled, total genomic DNA extracted, and PCR amplification at both transgene genomic DNA junctions was carried out using the primer pairs (corresponding to SEQ ID NOs: 98-101). The resulting amplification products were sequenced for confirmation. Plants with confirmed junctions at both ends were further analyzed by Southern hybridization (FIG. 38) using two probes, genomic (outside HR1 region, SEQ ID: 533) and transgenic (within MoPAT gene, SEQ ID: 534). PCR, sequencing and Southern hybridization data demonstrated that plants regenerated from two of the 7 events (events 1 and 2) demonstrated perfect, clean, single copy transgene integration at the expected target site via homologous recombination. Plants regenerated from the remaining 5 events contained either additional, randomly integrated copies of the transgene (events 4, 5, and 6) or rearranged copies of the transgene integrated into the target site (events 3 and 7).

[0647] T0 plants from events 1 and 2 were crossed with wild type maize plants to produce T1 seeds. Ninety-six T1 plants from events 1 and 2 were analyzed by Southern hybridization (using the same probes as above) to evaluate segregation frequencies of the transgene locus. Southern results demonstrated proper inheritance and expected (1:1) segregation of the transgene and wild type loci.

[0648] The data clearly demonstrate that maize chromosomal loci cleaved with the maize optimized guide RNA/Cas system described herein can be used to stimulate HR repair pathways to site-specifically insert transgenes and produce progeny plants that have the inserted transgene stably inherited.

### Example 38

### Production of Maize Transgenic Lines with Pre-Integrated Cas9 for Transient Delivery of Guide RNA

[0649] This example describes the rationale, production, and testing of maize transgenic lines with an integrated Cas9 gene under constitutive and temperature inducible promoters.

[0650] As demonstrated in Example 2, a high mutation frequency was observed when Cas9 endonuclease and guide RNA were delivered as DNA vectors by biolistic transformation to immature corn embryo cells. When Cas9 endonuclease was delivered as a DNA vector and guide RNA as RNA molecules, a reduced mutation frequency was observed (Table 44).

TABLE 44
Mutant reads at LigCas-3 target site produced by transiently delivered
guide RNA.

| Target Site | | | | |
|---|---|---|---|---|
| Examined for | Transient | Expression | Mutant | Total |
| Mutations | Delivery | Cassette | Reads | Reads |
| LIGCas-3 | — | Cas9 | 24.2 | 1,599,492 |
| LIGCas-3 | — | Cas9/guide | 44170 | 1,674,825 |
| | | RNA | | |
| LIGCas-3 | 35 ng guide RNA | Cas9 | 418 | 1,622,180 |
| LIGCas-3 | 70 ng guide RNA | Cas9 | 667 | 1,791,388 |
| LIGCas-3 | 140 ng guide RNA | Cas9 | 239 | 1,632,137 |

[0651] Increased efficiency (increased mutant reads) may occur when the Cas9 protein and guide RNA are present in the cell at the same time. To facilitate the presence of both Cas9 endonuclease and guide RNA in the same cell, a vector containing a constitutive and conditionally regulated Cas9 gene can be first delivered to plant cells to allow for stable integration into the plant genome to establish a plant line that contains only the Cas9 gene in the plant genome. Then, single or multiple guide RNAs can be delivered as either DNA or RNA, or combination, to the embryo cells of the plant line containing the genome-integrated version of the Cas9 gene.

[0652] Transgenic maize (genotype Hi-II) lines with an integrated Cas9 gene driven by either a constitutive (Ubi) or an inducible (CAS) promoter were generated via Agrobacterium-mediated transformation. Besides the Cas9 gene, the Agro vector also contained a visible marker (END2:Cyan) and a Red Fluorescent Protein sequence interrupted with a 318 bp long linker (H2B:RF-FP). The linker sequence was flanked with 370 bp long direct repeats to promote recombination and restoration of a functional RFP gene sequence upon double strand break within the linker.

[0653] Lines with single copies of the transgene were identified and used for further experiments. Two guide RNA constructs targeting 2 different sites (Table 45 in the linker sequence, were delivered into immature embryo cells via particle bombardment. Meganuclease variant LIG3-4 B65 with very high cutting activity previously used in similar experiments was used as the positive control.

TABLE 45
Target sites in the RF-FP linker for guideRNA/Cas
endonuclease system.

| | Guide | | | | |
|---|---|---|---|---|---|
| | RNA | Target Site | | PAM | SEQ |
| Locus | Used | Designation | Target Site Sequence | Sequence | ID NO: |
| RF- | Long | RF-FPCas-1 | GCAGGTCTCACGACGGT | TGG | 535 |
| FP | Long | RF-FPCas-2 | GTAAAGTACGCGTACGTGTG | AGG | 536 |
| linker | | | | | |

[0654] After transformation, embryos with Cas9 gene under Ubiquitin promoter were incubated at 28° C. while embryos with Cas9 gene under temperature inducible CAS promoter were first incubated at 37° C. for 15-20 hours and then transferred to 28° C. Embryos were examined 3-5 days after bombardment under luminescent microscope. Expression and activity of the pre-integrated Cas9 protein was visually evaluated based on the number of embryo cells with RFP protein expression. In most lines, the guide RNA/Cas endonuclease system demonstrated similar or higher frequency of RFP repair than LIG3-4 B65 meganuclease indicating high level of Cas9 protein expression and activity in the generated transgenic lines.

[0655] This example describes the production of transgenic lines with a pre-integrated Cas9 gene that can be used in further experiments to evaluate efficiency of mutagenesis at a target site upon transient delivery of guide RNA in the form of RNA molecules.

### Example 39

### The Guide RNA/Cas Endonuclease System Delivers Double-Strand Breaks to the Maize ALS Locus and Facilitates Editing of the ALS Gene

[0656] This example demonstrates that the guide RNA/Cas endonuclease system can be efficiently used to introduce specific changes into the nucleotide sequence of the maize ALS gene resulting in resistance to sulfonylurea class herbicides, specifically, chlorsulfuron.

[0657] Endogenous ALS protein is the target site of ALS inhibitor sulfonylurea class herbicides. Expression of the herbicide tolerant version of ALS protein in crops confers tolerance to this class of herbicides. The ALS protein contains N-terminal transit peptides, and the mature protein is formed following transport into the chloroplast and subsequent cleavage of the transit peptide. The mature protein starts at residue S41, resulting in a mature protein of 598 amino acids with a predicted molecular weight of 65 kDa (SEQ ID NO: 550).

TABLE 46
Deduced Amino Acid Sequence of the Full-Length
ZM-ALS Protein (SEQ ID no: 550)

| | |
|---|---|
| 1 | MATAAAASTA LTGATTAAPK ARRRAHLLAT RRALAAPIRC SAASPAMPMA |
| 51 | PPATPLRPWG PTEPRKGADI LVESLERCGV RDVFAYPGGA SMEIHQALTR |
| 101 | SPVIANHLFR HEQGEAFAAS GYARSSGRVG VCIATSGPGA TNLVSALADA |
| 151 | LLDSVPMVAI TGQVPRRMIG TDAFQETPIV EVTRSITKHN YLVLDVDDIP |
| 201 | RVVQEAFFLA SSGRPGPVLV DIPKDIQQQM AVPVWDKPMS LPGYIARLPK |
| 251 | PPATELLEQV LRLVGESRRP VLYVGGGCAA SGEELRRFVE LTGIPVTTTL |
| 301 | MGLGNFPSDD PLSLRMLGMH GTVYANYAVD KADLLLALGV RFDDRVTGKI |
| 351 | EAFASRAKIV HVDIDPAEIG KNKQPHVSIC ADVKLALQGM NALLEGSTSK |
| 401 | KSFDFGSWND ELDQQKREFP LGYKTSNEEI QPQYAIQVLD ELTKGEAIIG |
| 451 | TGVGQHQMWA AQYYTYKRPR QWLSSAGLGA MGFGLPAAAG ASVANPGVTV |
| 501 | VDIDGDGSFL MNVQELAMIR IENLPVKVFV LNNQHLGMVV QWEDRFYKAN |
| 551 | RAHTYLGNPE NESEIYPDFV TIAKGFNIPA VRVTKKNEVR AAIKKMLETP |
| 601 | GPYLLDIIVP HQEHVLPMIP SGGAFKDMIL DGDGRTVY |

[0658] Modification of a single amino acid residue (P165A or P165S, shown in bold) from the endogenous maize acetoacetate synthase protein provides resistance to herbicides in maize.

[0659] There are two ALS genes in maize, ALS1 and ALS2, located on chromosomes 5 and 4, respectively. As described in Example 2, guide RNA expressing constructs for 3 different target sites within the ALS genes were tested. Based on polymorphism between ALS1 and ALS2 nucleotide sequences, ALS1-specific and ALSCas-4 target site were identified and tested. ALSCas-1 guide RNA expressing construct targeting both ALS1 and ALS2 genes was used as control (Table 47)

TABLE 47
Maize ALS genomic target sites tested.

| | | | | | | SEQ |
|---|---|---|---|---|---|---|
| | | Guide | Target Site | Maize Genomic Target Site | PAM | ID |
| Locus | Location | RNA | Designation | Sequence | Sequence | NO: |
| ALS | Chr. 4: | Long | ALSCas-1 | GGTGCCAATCATGCGTCG | CGG | 22 |
| | 107.73cM | Long | ALSCas-4 | GCTGCTCGATTCCGTCCCCA | TGG* | 537 |
| | and | | | | | |
| | Chr. 5: | | | | | |
| | 115.49cM | | | | | |

*Target site in the ALS1 gene; bolded nucleotides are different in the ALS2 gene.

The experiment was conducted and mutation frequency determined as described in Example 2 and results are shown in Table 48.

TABLE 48
Frequencies of NHEJ mutations at the two ALS target sites recovered by
deep sequencing.

| TS | Total Reads | Mutant reads (ALS1) | Mutant reads (ALS2) |
|---|---|---|---|
| ALSCas-1 | 204,230 | 5072 (2.5%) | 2704 (1.3%) |
| ALSCas-4 | 120,766 | 3294 (2.7%) | 40 (0.03%) |

The results demonstrated that ALSCas-4 guide RNA/Cas9 system mutates the ALS1 gene with approximately 90 times higher efficiency than the ALS2 gene. Therefore, the ALSCas-4 target site and the corresponding guide RNA were selected for the ALS gene editing experiment.

[0660] To produce edited events, the ALS polynucleotide modification repair template was co-delivered using particle bombardment as a plasmid with an 804 bp long homologous region (SEQ ID NO: 538) or as a single-stranded 127 bp DNA fragment (SEQ ID NO: 539), the maize optimized Cas9 endonuclease expression vector described in Example 1, the guide RNA expression cassette (targeting ALSCas-4 site), a moPAT-DsRed fusion as selectable and visible markers, and developmental genes (ODP-2 and WUS). Approximately 1000 Hi-II immature embryos were bombarded with each of the two repair templates described above. Forty days after bombardment, 600 young callus events (300 for each repair template) were collected and transferred to the media with bialaphos selection. The embryos with remaining events were transferred to the media with 100 ppm of chlorsulfuron for selection. A month later, events that continued growing under chlorsulfuron selection were collected and used for analysis.

[0661] A small amount of callus tissue from each selected event was used for total DNA extraction. A pair of genomic primers outside the repair/donor DNA fragment (SEQ ID NO:540 and SEQ ID NO:541) was used to amplify an endogenous fragment of the ALS1 locus containing the ALSCas4 target sequence. The PCR amplification products were gel purified, cloned into the pCR2.1 TOPO cloning vector (Invitrogen) and sequenced. A total of 6 events demonstrated the presence of the specifically edited ALS1 allele as well as either a wild type or a mutagenized second allele.

[0662] These data indicate that a guide RNA/Cas system can be successfully used to create edited ALS allele in maize. The data further demonstrates that the guide RNA/maize optimized Cas endonuclease system described herein, can be used to produce progeny plants containing gene edits that are stably inherited.

### Example 40

### Gene Editing of the Soybean ALS1 Gene and Use as a Transformation Selectable Marker for Soybean Transformation with the Guide RNA/Cas Endonuclease System

[0663] A. guideRNA/Cas9 Endonuclease Target Site Design on the Soybean ALS1 Gene.

[0664] There are four ALS genes in soybean (Glyma04g37270, Glyma06g17790, Glyma13g31470 and Glyma15g07860). Two guideRNA/Cas9 endonuclease target sites (soy ALS1-CR1 and soy ALS1-CR2) were designed near the Proline 178 of the soybean ALS1 gene Glyma04g37270 (Table 49).

TABLE 49
Guide RNA/Cas9 endonuclease target sites on soybean ALS1 gene

| | Cas | |
|---|---|---|
| | endonuclease | |
| Name of gRNA-Cas9 | target | |
| endonuclease | sequence | |
| target site | (SEQ ID NO:) | Physical location |
| soy ALS1-CR1 | 542 | Gm04: 43645633..43645612 |
| soy ALS1-CR2 | 543 | Gm04: 43645594..43645615 |

### B. Guide-RNA Expression Cassettes, Cas9 Endonuclease Expression Cassettes, Polynucleotide Modification Templates for Introduction of Specific Amino Acid Changes and Use the P178S Modified ALS1 Allele as a Soybean Transformation Selectable Marker

[0665] The soybean U6 small nuclear RNA promoter, GM-U6-13.1 (SEQ ID. NO: 469), was used to express guide RNAs to direct Cas9 nuclease to designated genomic target sites (Table 50). A soybean codon optimized Cas9 endonuclease (SEQ ID NO:489) expression cassette and a guide RNA expression cassette were linked in a first plasmid that was co-delivered with a polynucleotide modification template. The polynucleotide modification template contained specific nucleotide changes that encoded for amino acid changes in the soy ALS1 polypeptide (Glyma04g37270), such as the P178S. Other amino acid changes in the ALS1 polypeptide can also be obtained using the guide RNA/Cas endonuclease system described herein. Specific amino acid modifications can be achieved by homologous recombination between the genomic DNA and the polynucleotide modification template facilitated by the guideRNA/Cas endonuclease system.

TABLE 50
Guide RNA/Cas9 expression cassettes and polynucleotide modification
templates used in soybean stable transformation for the specific amino
acid modifications of the soy ALS1 gene.

| | | | polynucleotide | SEQ |
|---|---|---|---|---|
| | Guide RNA/Cas9 | SEQ ID | modification | ID |
| Experiment | (plasmid name) | NO: | template | NO: |
| soy ALS1-CR1 | U6-13.1:ALS1-CR1 + | 544 | RTW1026A | 546 |
| | EF1A2:CAS9 | | | |
| | (QC880) | | | |
| soy ALS-CR2 | U6-13.1:ALS1-CR2 + | 545 | RTW1026A | 546 |
| | EF1A2:CAS9 | | | |
| | (QC881) | | | |

### C. Detection of the P178S Mutation in the Soybean ALS1 Gene in the Event Selected by Chlorsulfuron

[0666] In order to edit specific amino acids at the native ALS1 gene (such as the P178S modification), a polynucleotide modification template such as RTW1026A (Table 50), was co-delivered with the guideRNA/Cas9 expression cassettes into soybean cells. Chlorsulfuron (100 ppb) was used to select the P178S ALS1 gene editing events in soybean transformation process.

[0667] The modification of the native ALS1 gene via guide RNA/Cas9 system mediated DNA homologous recombination was determined by specific PCR analysis. A specific PCR assay with primer pair WOL900 (SEQ ID NO: 547) and WOL578 (SEQ ID NO: 548) was used to detect perfect P178S modification at the native ALS1 gene. A second primer pair WOL573 (SEQ ID NO: 549) and WOL578 (SEQ ID NO: 548) was used to amplify both a P178S modified Soy ALS1 allele and a NHEJ mutated allele. A chlorsulfuron tolerant event (MSE3772-18) was generated from the soy ALS1-CR2 experiment. The event contained a perfect P178S modified allele and a 2^{nd} allele with a 5 bp deletion at the soyALS1-CR2 cleavage site. Topo cloning/sequencing was used to verify the sequences. Our results demonstrated one P178S modified ALS1 allele is sufficient to provide Chlorsulfuron selection in soybean transformation process.

### Example 41

### Soybean FAD2-1 Gene Knockout in Combination with P178S ALS1 Modification as a Selectable Marker Using the guideRNA/Cas Endonuclease System

[0668] This example describes a method for gene modification in a plant genome using the guide RNA/Cas system without the insertion of an exogenous selectable marker into said plant genome. Instead, an herbicide resistance trait is generated by editing a first gene located in a plant genome while simultaneously knocking out a second gene located at a different locus than the first gene. This is accomplished by using two guides in combination with the Cas endonuclease as described below.

A. guideRNA/Cas9 Endonuclease Target Site Design on the Soybean FAD2-1 Genes.

[0669] There are two FAD2-1 genes in soybean (FAD2-1A for Glyma10g42470 and FAD2-1B for Glyma20g24530). Two guideRNA/Cas9 endonuclease target sites (soy FAD2-1-CR1 and soy FAD2-1-CR2) were designed to target both FAD2-1 genes for each gRNA (Table 51).

TABLE 51
Guide RNA/Cas9 endonuclease target sites on soybean FAD2-1 gene

| | Cas | |
|---|---|---|
| | endonuclease | |
| Name of gRNA-Cas9 | target | |
| endonuclease | sequence | |
| target site | (SEQ ID NO:) | Physical location |
| soy FAD2-1-CR1 | 551 | Gm10: 49417140..49417118 |
| | | Gm20: 34178367..34178345 |
| soy FAD2-1-CR2 | 552 | Gm10: 49417140..49417161 |
| | | Gm20: 34178367..34178388 |

B. Guide-RNA Expression Cassettes, Cas9 Endonuclease Expression Cassettes and Knockout of the Soybean FAD2-1 Genes with P178S ALS1 Gene Editing as the Transformation Selectable Marker.

[0670] The soybean U6 small nuclear RNA promoter, GM-U6-13.1 (SEQ ID. NO: 469), was used to express guide RNAs to direct Cas9 nuclease to designated genomic target sites (Table 52). A soybean codon optimized Cas9 endonuclease (SEQ ID NO: 489) expression cassette and a guide RNA expression cassette for the ALS1 gene were linked in a first plasmid (QC881) that was co-delivered with an ALS1 polynucleotide modification template (RTW1026A). With a second gRNA plasmid (RTW1211 or RTW1212) targeting the FAD2-1 genes simultaneously, the FAD2-1 knockout events can be identified in the chlorsulfuron tolerant events by qPCR and PCR assays.

TABLE 52
Guide RNA/Cas9 expression cassettes and polynucleotide modification
templates used in soybean stable transformation for the specific amino
acid modifications of the soy ALS1 gene and FAD2-1 knock-out.

| | | | polynucleotide | |
|---|---|---|---|---|
| | Guide RNA/Cas9 | SEQ | modification | SEQ ID |
| Experiment | (plasmid name) | ID NO: | template | NO: |
| soy ALS1-CR2 | QC881 | 545 | RTW1026A | 546 |
| soy FAD2-1-CR1 | RTW1211 | 553 | | |
| soy ALS-CR2 | QC881 | 545 | RTW1026A | 546 |
| soy FAD2-1 CR2 | RTW1212 | 554 | | |

### Example 42

### Soybean EPSPS1 Gene Editing in Combination with P178S ALS1 Modification as a Selectable Marker Using the Guide RNA/Cas Endonuclease System

[0671] This example describes a method for gene modification in a plant genome using the guide RNA/Cas system without the insertion of an exogenous selectable marker into said plant genome. Instead, an herbicide resistance trait is generated by editing a first gene located in a plant genome while simultaneously inserting a polynucleotide of interest located at a different locus in the plant genome. This is accomplished by using two guides in combination with the Cas endonuclease as described below.

[0672] The EPSPS gene editing as described in Example 24, 25 and 26 can also be carried out in combination with the P178S ALS1 modification by using multiple gRNAs targeting both the soybean EPSPS gene and soy ALS1 gene. The soybean EPSPS1 gene editing events can be identified in the chlorsulfuron tolerant events.

### Example 43

### Targeted Gene Integration in Combination with P178S ALS1 Modification as a Selectable Marker Using the Guide RNA/Cas Endonuclease System

[0673] This example describes a method for gene modification in a plant genome using the guide RNA/Cas system without the insertion of an exogenous selectable marker into said plant genome. Instead, an herbicide resistance trait is generated by editing a first gene located in a plant genome while simultaneously editing a second gene located at a different locus in the plant genome. This is accomplished by using two guides in combination with the Cas endonuclease as described below.

[0674] The targeted gene integration in soybean as described in Example 19, 20 and 21 can also be carried out in combination with the P178S ALS1 modification by using multiple gRNAs targeting both the intended gene integration sites and soy ALS1 gene. The perfect gene integration events can be identified in the chlorsulfuron tolerant events.

The application's sequence listing, which the Patent Office published only in electronic form, follows.

SEQUENCE LISTING (554 sequences)

SEQ ID NO: 1 - DNA, 4107 bp, Streptococcus pyogenes M1 GAS (SF370)
atggataagaaatactcaataggcttagatatcggcacaaatagcgtcggatgggcggtgatcactgatgaatataaggttccgtctaaaaagttcaaggttctgggaaatacagaccgccacagtatcaaaaaaaatcttataggggctcttttatttgacagtggagagacagcggaagcgactcgtctcaaacggacagctcgtagaaggtatacacgtcggaagaatcgtatttgttatctacaggagattttttcaaatgagatggcgaaagtagatgatagtttctttcatcgacttgaagagtcttttttggtggaagaagacaagaagcatgaacgtcatcctatttttggaaatatagtagatgaagttgcttatcatgagaaatatccaactatctatcatctgcgaaaaaaattggtagattctactgataaagcggatttgcgcttaatctatttggccttagcgcatatgattaagtttcgtggtcattttttgattgagggagatttaaatcctgataatagtgatgtggacaaactatttatccagttggtacaaacctacaatcaattatttgaagaaaaccctattaacgcaagtggagtagatgctaaagcgattctttctgcacgattgagtaaatcaagacgattagaaaatctcattgctcagctccccggtgagaagaaaaatggcttatttgggaatctcattgctttgtcattgggtttgacccctaattttaaatcaaattttgatttggcagaagatgctaaattacagctttcaaaagatacttacgatgatgatttagataatttattggcgcaaattggagatcaatatgctgatttgtttttggcagctaagaatttatcagatgctattttactttcagatatcctaagagtaaatactgaaataactaaggctcccctatcagcttcaatgattaaacgctacgatgaacatcatcaagacttgactcttttaaaagctttagttcgacaacaacttccagaaaagtataaagaaatcttttttgatcaatcaaaaaacggatatgcaggttatattgatgggggagctagccaagaagaattttataaatttatcaaaccaattttagaaaaaatggatggtactgaggaattattggtgaaactaaatcgtgaagatttgctgcgcaagcaacggacctttgacaacggctctattccccatcaaattcacttgggtgagctgcatgctattttgagaagacaagaagacttttatccatttttaaaagacaatcgtgagaagattgaaaaaatcttgacttttcgaattccttattatgttggtccattggcgcgtggcaatagtcgttttgcatggatgactcggaagtctgaagaaacaattaccccatggaattttgaagaagttgtcgataaaggtgcttcagctcaatcatttattgaacgcatgacaaactttgataaaaatcttccaaatgaaaaagtactaccaaaacatagtttgctttatgagtattttacggtttataacgaattgacaaaggtcaaatatgttactgaaggaatgcgaaaaccagcatttctttcaggtgaacagaagaaagccattgttgatttactcttcaaaacaaatcgaaaagtaaccgttaagcaattaaaagaagattatttcaaaaaaatagaatgttttgatagtgttgaaatttcaggagttgaagatagatttaatgcttcattaggtacctaccatgatttgctaaaaattattaaagataaagattttttggataatgaagaaaatgaagatatcttagaggatattgttttaacattgaccttatttgaagatagggagatgattgaggaaagacttaaaacatatgctcacctctttgatgataaggtgatgaaacagcttaaacgtcgccgttatactggttggggacgtttgtctcgaaaattgattaatggtattagggataagcaatctggcaaaacaatattagattttttgaaatcagatggttttgccaatcgcaattttatgcagctgatccatgatgatagtttgacatttaaagaagacattcaaaaagcacaagtgtctggacaaggcgatagtttacatgaacatattgcaaatttagctggtagccctgctattaaaaaaggtattttacagactgtaaaagttgttgatgaattggtcaaagtaatggggcggcataagccagaaaatatcgttattgaaatggcacgtgaaaatcagacaactcaaaagggccagaaaaattcgcgagagcgtatgaaacgaatcgaagaaggtatcaaagaattaggaagtcagattcttaaagagcatcctgttgaaaatactcaattgcaaaatgaaaagctctatctctattatctccaaaatggaagagacatgtatgtggaccaagaattagatattaatcgtttaagtgattatgatgtcgatcacattgttccacaaagtttccttaaagacgattcaatagacaataaggtcttaacgcgttctgataaaaatcgtggtaaatcggataacgttccaagtgaagaagtagtcaaaaagatgaaaaactattggagacaacttctaaacgccaagttaatcactcaacgtaagtttgataatttaacgaaagctgaacgtggaggtttgagtgaacttgataaagctggttttatcaaacgccaattggttgaaactcgccaaatcactaagcatgtggcacaaattttggatagtcgcatgaatactaaatacgatgaaaatgataaacttattcgagaggttaaagtgattaccttaaaatctaaattagtttctgacttccgaaaagatttccaattctataaagtacgtgagattaacaattaccatcatgcccatgatgcgtatctaaatgccgtcgttggaactgctttgattaagaaatatccaaaacttgaatcggagtttgtctatggtgattataaagtttatgatgttcgtaaaatgattgctaagtctgagcaagaaataggcaaagcaaccgcaaaatatttcttttactctaatatcatgaacttcttcaaaacagaaattacacttgcaaatggagagattcgcaaacgccctctaatcgaaactaatggggaaactggagaaattgtctgggataaagggcgagattttgccacagtgcgcaaagtattgtccatgccccaagtcaatattgtcaagaaaacagaagtacagacaggcggattctccaaggagtcaattttaccaaaaagaaattcggacaagcttattgctcgtaaaaaagactgggatccaaaaaaatatggtggttttgatagtccaacggtagcttattcagtcctagtggttgctaaggtggaaaaagggaaatcgaagaagttaaaatccgttaaagagttactagggatcacaattatggaaagaagttcctttgaaaaaaatccgattgactttttagaagctaaaggatataaggaagttaaaaaagacttaatcattaaactacctaaatatagtctttttgagttagaaaacggtcgtaaacggatgctggctagtgccggagaattacaaaaaggaaatgagctggctctgccaagcaaatatgtgaattttttatatttagctagtcattatgaaaagttgaagggtagtccagaagataacgaacaaaaacaattgtttgtggagcagcataagcattatttagatgagattattgagcaaatcagtgaattttctaagcgtgttattttagcagatgccaatttagataaagttcttagtgcatataacaaacatagagacaaaccaatacgtgaacaagcagaaaatattattcatttatttacgttgacgaatcttggagctcccgctgcttttaaatattttgatacaacaattgatcgtaaacgatatacgtctacaaaagaagttttagatgccactcttatccatcaatccatcactggtctttatgaaacacgcattgatttgagtcagctaggaggtgactga

SEQ ID NO: 2 - DNA, 189 bp, Solanum tuberosum
gtaagtttctgcttctacctttgatatatatataataattatcattaattagtagtaatataatatttcaaatatttttttcaaaataaaagaatgtagtatatagcaattgcttttctgtagtttataagtgtgtatattttaatttataacttttctaatatatgaccaaaacatggtgatgtgcag

SEQ ID NO: 3 - protein, 9 aa, Simian virus 40
MAPKKKRKV

SEQ ID NO: 4 - protein, 18 aa, Agrobacterium tumefaciens
KRPRDRHDGELGGRKRAR

SEQ ID NO: 5 - DNA, 6717 bp, Artificial Sequence
  Maize optimized Cas9 expression cassette
gtgcagcgtgacccggtcgtgcccctctctagagataatgagcattgcatgtctaagttataaaaaattaccacatattttttttgtcacacttgtttgaagtgcagtttatctatctttatacatatatttaaactttactctacgaataatataatctatagtactacaataatatcagtgttttagagaatcatataaatgaacagttagacatggtctaaaggacaattgagtattttgacaacaggactctacagttttatctttttagtgtgcatgtgttctcctttttttttgcaaatagcttcacctatataatacttcatccattttattagtacatccatttagggtttagggttaatggtttttatagactaatttttttagtacatctattttattctattttagcctctaaattaagaaaactaaaactctattttagtttttttatttaataatttagatataaaatagaataaaataaagtgactaaaaattaaacaaataccctttaagaaattaaaaaaactaaggaaacatttttcttgtttcgagtagataatgccagcctgttaaacgccgtcgacgagtctaacggacaccaaccagcgaaccagcagcgtcgcgtcgggccaagcgaagcagacggcacggcatctctgtcgctgcctctggacccctctcgagagttccgctccaccgttggacttgctccgctgtcggcatccagaaattgcgtggcggagcggcagacgtgagccggcacggcaggcggcctcctcctcctctcacggcaccggcagctacgggggattcctttcccaccgctccttcgctttcccttcctcgcccgccgtaataaatagacaccccctccacaccctctttccccaacctcgtgttgttcggagcgcacacacacacaaccagatctcccccaaatccacccgtcggcacctccgcttcaaggtacgccgctcgtcctcccccccccccctctctaccttctctagatcggcgttccggtccatgcatggttagggcccggtagttctacttctgttcatgtttgtgttagatccgtgtttgtgttagatccgtgctgctagcgttcgtacacggatgcgacctgtacgtcagacacgttctgattgctaacttgccagtgtttctctttggggaatcctgggatggctctagccgttccgcagacgggatcgatttcatgattttttttgtttcgttgcatagggtttggtttgcccttttcctttatttcaatatatgccgtgcacttgtttgtcgggtcatcttttcatgcttttttttgtcttggttgtgatgatgtggtctggttgggcggtcgttctagatcggagtagaattctgtttcaaactacctggtggatttattaattttggatctgtatgtgtgtgccatacatattcatagttacgaattgaagatgatggatggaaatatcgatctaggataggtatacatgttgatgcgggttttactgatgcatatacagagatgctttttgttcgcttggttgtgatgatgtggtgtggttgggcggtcgttcattcgttctagatcggagtagaatactgtttcaaactacctggtgtatttattaattttggaactgtatgtgtgtgtcatacatcttcatagttacgagtttaagatggatggaaatatcgatctaggataggtatacatgttgatgtgggttttactgatgcatatacatgatggcatatgcagcatctattcatatgctctaaccttgagtacctatctattataataaacaagtatgttttataattattttgatcttgatatacttggatgatggcatatgcagcagctatatgtggatttttttagccctgccttcatacgctatttatttgcttggtactgtttcttttgtcgatgctcaccctgttgtttggtgttacttctgcaggtcgactctagaggatccatggcaccgaagaagaagcgcaaggtgatggacaagaagtacagcatcggcctcgacatcggcaccaactcggtgggctgggccgtcatcacggacgaatataaggtcccgtcgaagaagttcaaggtcctcggcaatacagaccgccacagcatcaagaaaaacttgatcggcgccctcctgttcgatagcggcgagaccgcggaggcgaccaggctcaagaggaccgccaggagacggtacactaggcgcaagaacaggatctgctacctgcaggagatcttcagcaacgagatggcgaaggtggacgactccttcttccaccgcctggaggaatcattcctggtggaggaggacaagaagcatgagcggcacccaatcttcggcaacatcgtcgacgaggtaagtttctgcttctacctttgatatatatataataattatcattaattagtagtaatataatatttcaaatatttttttcaaaataaaagaatgtagtatatagcaattgcttttctgtagtttataagtgtgtatattttaatttataacttttctaatatatgaccaaaacatggtgatgtgcaggtggcctaccacgagaagtacccgacaatctaccacctccggaagaaactggtggacagcacagacaaggcggacctccggctcatctaccttgccctcgcgcatatgatcaagttccgcggccacttcctcatcgagggcgacctgaacccggacaactccgacgtggacaagctgttcatccagctcgtgcagacgtacaatcaactgttcgaggagaaccccataaacgctagcggcgtggacgccaaggccatcctctcggccaggctctcgaaatcaagaaggctggagaaccttatcgcgcagttgccaggcgaaaagaagaacggcctcttcggcaaccttattgcgctcagcctcggcctgacgccgaacttcaaatcaaacttcgacctcgcggaggacgccaagctccagctctcaaaggacacctacgacgacgacctcgacaacctcctggcccagataggagaccagtacgcggacctcttcctcgccgccaagaacctctccgacgctatcctgctcagcgacatccttcgggtcaacaccgaaattaccaaggcaccgctgtccgccagcatgattaaacgctacgacgagcaccatcaggacctcacgctgctcaaggcactcgtccgccagcagctccccgagaagtacaaggagatcttcttcgaccaatcaaaaaacggctacgcgggatatatcgacggcggtgccagccaggaagagttctacaagttcatcaaaccaatcctggagaagatggacggcaccgaggagttgctggtcaagctcaacagggaggacctcctcaggaagcagaggaccttcgacaacggctccatcccgcatcagatccacctgggcgaactgcatgccatcctgcggcgccaggaggacttctacccgttcctgaaggataaccgggagaagatcgagaagatcttgacgttccgcatcccatactacgtgggcccgctggctcgcggcaactcccggttcgcctggatgacccggaagtcggaggagaccatcacaccctggaactttgaggaggtggtcgataagggcgctagcgctcagagcttcatcgagcgcatgaccaacttcgataaaaacctgcccaatgaaaaagtcctccccaagcactcgctgctctacgagtacttcaccgtgtacaacgagctcaccaaggtcaaatacgtcaccgagggcatgcggaagccggcgttcctgagcggcgagcagaagaaggcgatagtggacctcctcttcaagaccaacaggaaggtgaccgtgaagcaattaaaagaggactacttcaagaaaatagagtgcttcgactccgtggagatctcgggcgtggaggatcggttcaacgcctcactcggcacgtatcacgacctcctcaagatcattaaagacaaggacttcctcgacaacgaggagaacgaggacatcctcgaggacatcgtcctcaccctgaccctgttcgaggaccgcgaaatgatcgaggagaggctgaagacctacgcgcacctgttcgacgacaaggtcatgaaacagctcaagaggcgccgctacactggttggggaaggctgtcccgcaagctcattaatggcatcagggacaagcagagcggcaagaccatcctggacttcctcaagtccgacgggttcgccaaccgcaacttcatgcagctcattcacgacgactcgctcacgttcaaggaagacatccagaaggcacaggtgagcgggcagggtgactccctccacgaacacatcgccaacctggccggctcgccggccattaaaaagggcatcctgcagacggtcaaggtcgtcgacgagctcgtgaaggtgatgggccggcacaagcccgaaaatatcgtcatagagatggccagggagaaccagaccacccaaaaagggcagaagaactcgcgcgagcggatgaaacggatcgaggagggcattaaagagctcgggtcccagatcctgaaggagcaccccgtggaaaatacccagctccagaatgaaaagctctacctctactacctgcagaacggccgcgacatgtacgtggaccaggagctggacattaatcggctatcggactacgacgtcgaccacatcgtgccgcagtcgttcctcaaggacgatagcatcgacaacaaggtgctcacccggtcggataaaaatcggggcaagagcgacaacgtgcccagcgaggaggtcgtgaagaagatgaaaaactactggcgccagctcctcaacgcgaaactgatcacccagcgcaagttcgacaacctgacgaaggcggaacgcggtggcttgagcgaactcgataaggcgggcttcataaaaaggcagctggtcgagacgcgccagatcacgaagcatgtcgcccagatcctggacagccgcatgaatactaagtacgatgaaaacgacaagctgatccgggaggtgaaggtgatcacgctgaagtccaagctcgtgtcggacttccgcaaggacttccagttctacaaggtccgcgagatcaacaactaccaccacgcccacgacgcctacctgaatgcggtggtcgggaccgccctgatcaagaagtacccgaagctggagtcggagttcgtgtacggcgactacaaggtctacgacgtgcgcaaaatgatcgccaagtccgagcaggagatcggcaaggccacggcaaaatacttcttctactcgaacatcatgaacttcttcaagaccgagatcaccctcgcgaacggcgagatccgcaagcgcccgctcatcgaaaccaacggcgagacgggcgagatcgtctgggataagggccgggatttcgcgacggtccgcaaggtgctctccatgccgcaagtcaatatcgtgaaaaagacggaggtccagacgggcgggttcagcaaggagtccatcctcccgaagcgcaactccgacaagctcatcgcgaggaagaaggattgggacccgaaaaaatatggcggcttcgacagcccgaccgtcgcatacagcgtcctcgtcgtggcgaaggtggagaagggcaagtcaaagaagctcaagtccgtgaaggagctgctcgggatcacgattatggagcggtcctccttcgagaagaacccgatcgacttcctagaggccaagggatataaggaggtcaagaaggacctgattattaaactgccgaagtactcgctcttcgagctggaaaacggccgcaagaggatgctcgcctccgcaggcgagttgcagaagggcaacgagctcgccctcccgagcaaatacgtcaatttcctgtacctcgctagccactatgaaaagctcaagggcagcccggaggacaacgagcagaagcagctcttcgtggagcagcacaagcattacctggacgagatcatcgagcagatcagcgagttctcgaagcgggtgatcctcgccgacgcgaacctggacaaggtgctgtcggcatataacaagcaccgcgacaaaccaatacgcgagcaggccgaaaatatcatccacctcttcaccctcaccaacctcggcgctccggcagccttcaagtacttcgacaccacgattgaccggaagcggtacacgagcacgaaggaggtgctcgatgcgacgctgatccaccagagcatcacagggctctatgaaacacgcatcgacctgagccagctgggcggagacaagagaccacgggaccgccacgatggcgagctgggaggccgcaagcgggcaaggtaggtaccgttaacctagacttgtccatcttctggattggccaacttaattaatgtatgaaataaaaggatgcacacatagtgacatgctaatcactataatgtgggcatcaaagttgtgtgttatgtgtaattactagttatctgaataaaagagaaagagatcatccatatttcttatcctaaatgaatgtcacgtgtctttataattctttgatgaaccagatgcatttcattaaccaaatccatatacatataaatattaatcatatataattaatatcaattgggttagcaaaacaaatctagtctaggtgtgttttgcgaatgcggcc

SEQ ID NO: 6 - RNA, 39 nt, Artificial Sequence
  crRNA containing the LIGCas-3 target sequence in the variable targeting domain
gcguacgcguacgugugguuuuagagcuaugcuguuuug

SEQ ID NO: 7 - RNA, 86 nt, Streptococcus pyogenes M1 GAS (SF370)
  tracRNA (1)..(86)
ggaaccauucaaaacagcauagcaaguuaaaauaaggcuaguccguuaucaacuugaaaaaguggcaccgagucggugcuuuuuuu

SEQ ID NO: 8 - RNA, 94 nt, Artificial Sequence
  Long guide RNA containing the LIGCas-3 target sequence in the variable targeting domain
gcguacgcguacgugugguuuuagagcuagaaauagcaaguuaaaauaaggcuaguccguuaucaacuugaaaaaguggcaccgagucggugcu

SEQ ID NO: 9 - DNA, 1000 bp, Zea mays
tgagagtacaatgatgaacctagattaatcaatgccaaagtctgaaaaatgcaccctcagtctatgatccagaaaatcaagattgcttgaggccctgttcggttgttccggattagagccccggattaattcctagccggattacttctctaatttatatagattttgatgagctggaatgaatcctggcttattccggtacaaccgaacaggccctgaaggataccagtaatcgctgagctaaattggcatgctgtcagagtgtcagtattgcagcaaggtagtgagataaccggcatcatggtgccagtttgatggcaccattagggttagagatggtggccatgggcgcatgtcctggccaactttgtatgatatatggcagggtgaataggaaagtaaaattgtattgtaaaaagggatttcttctgtttgttagcgcatgtacaaggaatgcaagttttgagcgagggggcatcaaagatctggctgtgtttccagctgtttttgttagccccatcgaatccttgacataatgatcccgcttaaataagcaacctcgcttgtatagttccttgtgctctaacacacgatgatgataagtcgtaaaatagtggtgtccaaagaatttccaggcccagttgtaaaagctaaaatgctattcgaatttctactagcagtaagtcgtgtttagaaattatttttttatataccttttttccttctatgtacagtaggacacagtgtcagcgccgcgttgacggagaatatttgcaaaaaagtaaaagagaaagtcatagcggcgtatgtgccaaaaacttcgtcacagagagggccataagaaacatggcccacggcccaatacgaagcaccgcgacgaagcccaaacagcagtccgtaggtggagcaaagcgctgggtaatacgcaaacgttttgtcccaccttgactaatcacaagagtggagcgtaccttataaaccgagccgcaagcaccgaatt

SEQ ID NO: 10 - DNA, 16 bp, Zea mays
tttttttttttttttt

SEQ ID NO: 11 - RNA, 59 nt, Artificial Sequence
  Short guide RNA containing the LIGCas-3 variable targeting domain
gcguacgcguacgugugguuuuagagcuagaaauagcaaguuaaaauaaggcuaguccg

SEQ ID NO: 12 - DNA, 1102 bp, Artificial Sequence
  Maize optimized long guide RNA expression cassette containing the LIGCas-3 variable targeting domain
tgagagtacaatgatgaacctagattaatcaatgccaaagtctgaaaaatgcaccctcagtctatgatccagaaaatcaagattgcttgaggccctgttcggttgttccggattagagccccggattaattcctagccggattacttctctaatttatatagattttgatgagctggaatgaatcctggcttattccggtacaaccgaacaggccctgaaggataccagtaatcgctgagctaaattggcatgctgtcagagtgtcagtattgcagcaaggtagtgagataaccggcatcatggtgccagtttgatggcaccattagggttagagatggtggccatgggcgcatgtcctggccaactttgtatgatatatggcagggtgaataggaaagtaaaattgtattgtaaaaagggatttcttctgtttgttagcgcatgtacaaggaatgcaagttttgagcgagggggcatcaaagatctggctgtgtttccagctgtttttgttagccccatcgaatccttgacataatgatcccgcttaaataagcaacctcgcttgtatagttccttgtgctctaacacacgatgatgataagtcgtaaaatagtggtgtccaaagaatttccaggcccagttgtaaaagctaaaatgctattcgaatttctactagcagtaagtcgtgtttagaaattatttttttatataccttttttccttctatgtacagtaggacacagtgtcagcgccgcgttgacggagaatatttgcaaaaaagtaaaagagaaagtcatagcggcgtatgtgccaaaaacttcgtcacagagagggccataagaaacatggcccacggcccaatacgaagcaccgcgacgaagcccaaacagcagtccgtaggtggagcaaagcgctgggtaatacgcaaacgttttgtcccaccttgactaatcacaagagtggagcgtaccttataaaccgagccgcaagcaccgaattgcgtacgcgtacgtgtggttttagagctagaaatagcaagttaaaataaggctagtccgttatcaacttgaaaaagtggcaccgagtcggtgcttttttttt

SEQ ID NO: 13 - DNA, 27 bp, Zea mays
gtactccatccgccccatcgagtaggg

SEQ ID NO: 14 - DNA, 24 bp, Zea mays
gcacgtacgtcaccatcccgccgg

SEQ ID NO: 15 - DNA, 24 bp, Zea mays
gacgtacgtgccctactcgatggg

SEQ ID NO: 16 - DNA, 24 bp, Zea mays
gtaccgtacgtgccccggcggagg

SEQ ID NO: 17 - DNA, 24 bp, Zea mays
ggaattgtaccgtacgtgccccgg

SEQ ID NO: 18 - DNA, 20 bp, Zea mays
gcgtacgcgtacgtgtgagg

SEQ ID NO: 19 - DNA, 22 bp, Zea mays
gctggccgaggtcgactaccgg

SEQ ID NO: 20 - DNA, 23 bp, Zea mays
ggccgaggtcgactaccggccgg

SEQ ID NO: 21 - DNA, 23 bp, Zea mays
ggcgcgagctcgtgcttcaccgg

SEQ ID NO: 22 - DNA, 21 bp, Zea mays
ggtgccaatcatgcgtcgcgg

SEQ ID NO: 23 - DNA, 20 bp, Zea mays
ggtcgccatcacgggacagg

SEQ ID NO: 24 - DNA, 24 bp, Zea mays
gtcgcggcacctgtcccgtgatgg

SEQ ID NO: 25 - DNA, 23 bp, Zea mays
ggaatgctggaactgcaatgcgg

SEQ ID NO: 26 - DNA, 24 bp, Zea mays
gcagctcttcttggggaatgctgg

SEQ ID NO: 27 - DNA, 23 bp, Zea mays
gcagtaacagctgctgtcaatgg

SEQ ID NO: 28 - DNA, 56 bp, Artificial Sequence
  MS26Cas-1 forward primer
ctacactctttccctacacgacgctcttccgatctaggaccggaagctcgccgcgt

SEQ ID NO: 29 - DNA, 54 bp, Artificial Sequence
  MS26Cas-1 and MS26Cas-3 reverse primer
caagcagaagacggcatacgagctcttccgatcttcctggaggacgacgtgctg

SEQ ID NO: 30 - DNA, 59 bp, Artificial Sequence
  MS26Cas-2 forward primer
ctacactctttccctacacgacgctcttccgatctaaggtcctggaggacgacgtgctg

SEQ ID NO: 31 - DNA, 51 bp, Artificial Sequence
  MS26Cas-2 and MS26 meganuclease reverse primer
caagcagaagacggcatacgagctcttccgatctccggaagctcgccgcgt

SEQ ID NO: 32 - DNA, 56 bp, Artificial Sequence
  MS26Cas-3 forward primer
ctacactctttccctacacgacgctcttccgatcttcctccggaagctcgccgcgt

SEQ ID NO: 33 - DNA, 59 bp, Artificial Sequence
  MS26 Meganuclease forward primer
ctacactctttccctacacgacgctcttccgatctttcctcctggaggacgacgtgctg

SEQ ID NO: 34 - DNA, 63 bp, Artificial Sequence
  LIGCas-1 forward primer
ctacactctttccctacacgacgctcttccgatctaggactgtaacgatttacgcacctgctg

SEQ ID NO: 35 - DNA, 58 bp, Artificial Sequence
  LIGCas-1 and LIGCas-2 reverse primer
caagcagaagacggcatacgagctcttccgatctgcaaatgagtagcagcgcacgtat

SEQ ID NO: 36 - DNA, 63 bp, Artificial Sequence
  LIGCas-2 forward primer
ctacactctttccctacacgacgctcttccgatcttcctctgtaacgatttacgcacctgctg

SEQ ID NO: 37 - DNA, 60 bp, Artificial Sequence
  LIGCas-3 forward primer
ctacactctttccctacacgacgctcttccgatctaaggcgcaaatgagtagcagcgcac

SEQ ID NO: 38 - DNA, 57 bp, Artificial Sequence
  LIGCas-3 and LIG3-4 meganuclease reverse primer
caagcagaagacggcatacgagctcttccgatctcacctgctgggaattgtaccgta

SEQ ID NO: 39 - DNA, 60 bp, Artificial Sequence
  LIG3-4 meganuclease forward primer
ctacactctttccctacacgacgctcttccgatctccttcgcaaatgagtagcagcgcac

SEQ ID NO: 40 - DNA, 58 bp, Artificial Sequence
  MS45Cas-1 forward primer
ctacactctttccctacacgacgctcttccgatctaggaggacccgttcggcctcagt

SEQ ID NO: 41 - DNA, 54 bp, Artificial Sequence
  MS45Cas-1, MS45Cas-2 and MS45Cas-3 reverse primer
caagcagaagacggcatacgagctcttccgatctgccggctggcattgtctctg

SEQ ID NO: 42 - DNA, 58 bp, Artificial Sequence
  MS45Cas-2 forward primer
ctacactctttccctacacgacgctcttccgatcttcctggacccgttcggcctcagt

SEQ ID NO: 43 - DNA, 58 bp, Artificial Sequence
  MS45Cas-3 forward primer
ctacactctttccctacacgacgctcttccgatctgaagggacccgttcggcctcagt

SEQ ID NO: 44 - DNA, 58 bp, Artificial Sequence
  ALSCas-1 forward primer
ctacactctttccctacacgacgctcttccgatctaaggcgacgatgggcgtctcctg

SEQ ID NO: 45 - DNA, 53 bp, Artificial Sequence
  ALSCas-1, ALSCas-2 and ALSCas-3 reverse primer
caagcagaagacggcatacgagctcttccgatctgcgtctgcatcgccacctc

SEQ ID NO: 46 - DNA, 58 bp, Artificial Sequence
  ALSCas-2 forward primer
ctacactctttccctacacgacgctcttccgatctttcccgacgatgggcgtctcctg

SEQ ID NO: 47 - DNA, 58 bp, Artificial Sequence
  ALSCas-3 forward primer
ctacactctttccctacacgacgctcttccgatctggaacgacgatgggcgtctcctg

SEQ ID NO: 48 - DNA, 63 bp, Artificial Sequence
  EPSPSCas-1 forward primer
ctacactctttccctacacgacgctcttccgatctggaagaggaaacatacgttgcatttcca

SEQ ID NO: 49 - DNA, 57 bp, Artificial Sequence
  PSPSCas-1 and EPSPSCas-3 reverse primer
caagcagaagacggcatacgagctcttccgatctggtggaaagttcccagttgagga

SEQ ID NO: 50 - DNA, 62 bp, Artificial Sequence
  PSPSCas-2 forward primer
ctacactctttccctacacgacgctcttccgatctaagcggtggaaagttcccagttgagga

SEQ ID NO: 51 - DNA, 58 bp, Artificial Sequence
  EPSPSCas-2 reverse primer
caagcagaagacggcatacgagctcttccgatctgaggaaacatacgttgcatttcca

SEQ ID NO: 52 - DNA, 63 bp, Artificial Sequence
  EPSPSCas-3 forward primer
ctacactctttccctacacgacgctcttccgatctccttgaggaaacatacgttgcatttcca

SEQ ID NO: 53 - DNA, 43 bp, Artificial Sequence
  Forward primer for secondary PCR
aatgatacggcgaccaccgagatctacactctttccctacacg

SEQ ID NO: 54 - DNA, 18 bp, Artificial Sequence
  Reverse primer for secondary PCR
caagcagaagacggcata

SEQ ID NO: 55 - DNA, 93 bp, Zea mays
ctgtaacgatttacgcacctgctgggaattgtaccgtacgtgccccggcggaggatatatatacctcacacgtacgcgtacgcgtatatatac

SEQ ID NO: 56 - DNA, 98 bp, Artificial sequence
  Mutation 1 for LIGCas-1 locus
aggactgtaacgatttacgcacctgctgggaattgtaccgtacgtgccccggtcggaggatatatatacctcacacgtacgcgtacgcgtatatatac

SEQ ID NO: 57 - DNA, 98 bp, Artificial sequence
  Mutation 2 for LIGCas-1 locus
aggactgtaacgatttacgcacctgctgggaattgtaccgtacgtgccccggacggaggatatatatacctcacacgtacgcgtacgcgtatatatac

SEQ ID NO: 58 - DNA, 98 bp, Artificial sequence
  Mutation 3 for LIGCas-1 locus
aggactgtaacgatttacgcacctgctgggaattgtaccgtacgtgccccgggcggaggatatatatacctcacacgtacgcgtacgcgtatatatac

SEQ ID NO: 59 - DNA, 95 bp, Artificial sequence
  Mutation 4 for LIGCas-1 locus
aggactgtaacgatttacgcacctgctgggaattgtaccgtacgtgcggtcggaggatatatatacctcacacgtacgcgtacgcgtatatatac

SEQ ID NO: 60 - DNA, 98 bp, Artificial Sequence
  Mutation 5 for LIGCas-1 locus
aggactgtaacgatttacgcacctgctgggaattgtaccgtacgtgccccggccggaggatatatatacctcacacgtacgcgtacgcgtatatatac

SEQ ID NO: 61 - DNA, 96 bp, Artificial sequence
  Mutation 6 for LIGCas-1 locus
aggactgtaacgatttacgcacctgctgggaattgtaccgtacgtgccccgcggaggatatatatacctcacacgtacgcgtacgcgtatatatac

SEQ ID NO: 62 - DNA, 96 bp, Artificial Sequence
  Mutation 7 for LIGCas-1 locus
aggactgtaacgatttacgcacctgctgggaattgtaccgtacgtgccccggggaggatatatatacctcacacgtacgcgtacgcgtatatatac

SEQ ID NO: 63 - DNA, 94 bp, Artificial Sequence
  Mutation 8 for LIGCas-1 locus
aggactgtaacgatttacgcacctgctgggaattgtaccgtacgtgccccggaggatatatatacctcacacgtacgcgtacgcgtatatatac

SEQ ID NO: 64 - DNA, 94 bp, Artificial Sequence
  Mutation 8 for LIGCas-1 locus
aggactgtaacgatttacgcacctgctgggaattgtaccgtacgtgcgtcggaggatatatatacctcacacgtacgcgtacgcgtatatatac

SEQ ID NO: 65 - DNA, 43 bp, Artificial Sequence
  Mutation 10 for LIGCas-1 locus
aggactgtaacgatttacgcacctgctgggaattgtaccgtac

SEQ ID NO: 66 - DNA, 98 bp, Artificial Sequence
  Mutation 1 for LIGCas-2 locus
tcctctgtaacgatttacgcacctgctgggaattgtaccgtacgtgaccccggcggaggatatatatacctcacacgtacgcgtacgcgtatatatac

SEQ ID NO: 67 - DNA, 96 bp, Artificial Sequence
  Mutation 2 for LIGCas-2 locus
tcctctgtaacgatttacgcacctgctgggaattgtaccgtacgtccccggcggaggatatatatacctcacacgtacgcgtacgcgtatatatac

SEQ ID NO: 68 - DNA, 98 bp, Artificial Sequence
  Mutation 3 for LIGCas-2 locus
tcctctgtaacgatttacgcacctgctgggaattgtaccgtacgtgtccccggcggaggatatatatacctcacacgtacgcgtacgcgtatatatac

SEQ ID NO: 69 - DNA, 94 bp, Artificial Sequence
  Mutation 4 for LIGCas-2 locus
tcctctgtaacgatttacgcacctgctgggaattgtaccgtacccccggcggaggatatatatacctcacacgtacgcgtacgcgtatatatac

SEQ ID NO: 70 - DNA, 93 bp, Artificial Sequence
  Mutation 5 for LIGCas-2 locus
tcctctgtaacgatttacgcacctgctgggaattgtaccgtaccccggcggaggatatatatacctcacacgtacgcgtacgcgtatatatac

SEQ ID NO: 71 - DNA, 98 bp, Artificial Sequence
  Mutation 6 for LIGCas-2 locus
tcctctgtaacgatttacgcacctgctgggaattgtaccgtacgtggccccggcggaggatatatatacctcacacgtacgcgtacgcgtatatatac

SEQ ID NO: 72 - DNA, 92 bp, Artificial Sequence
  Mutation 7  for LIGCas-2 locus
tcctctgtaacgatttacgcacctgctgggaattgtaccgtacccggcggaggatatatatacctcacacgtacgcgtacgcgtatatatac

SEQ ID NO: 73 - DNA, 99 bp, Artificial Sequence
  Mutation 8 for LIGCas-2 locus
tcctctgtaacgatttacgcacctgctgggaattgtaccgtacgtgaaccccggcggaggatatatatacctcacacgtacgcgtacgcgtatatatac

SEQ ID NO: 74 - DNA, 61 bp, Artificial Sequence
  Mutation 9 for LIGCas-2 locus
tcctctgtaacgatttacgcacctgctgggaattgtaccgtacgtgtacgcgtatatatac

SEQ ID NO: 75 - DNA, 95 bp, Artificial Sequence
  Mutation 10 for LIGCas-2 locus
tcctctgtaacgatttacgcacctgctgggaattgtaccgtacgccccggcggaggatatatatacctcacacgtacgcgtacgcgtatatatac

SEQ ID NO: 76 - DNA, 93 bp, Zea mays
cgcaaatgagtagcagcgcacgtatatatacgcgtacgcgtacgtgtgaggtatatatatcctccgccggggcacgtacggtacaattcccag

SEQ ID NO: 77 - DNA, 98 bp, Artificial Sequence
  Mutation 1 for LIGCas-3 locus
aaggcgcaaatgagtagcagcgcacgtatatatacgcgtacgcgtacgttgtgaggtatatatatcctccgccggggcacgtacggtacaattcccag

SEQ ID NO: 78 - DNA, 96 bp, Artificial Sequence
  Mutation 2 for LIGCas-3 locus
aaggcgcaaatgagtagcagcgcacgtatatatacgcgtacgcgtacggtgaggtatatatatcctccgccggggcacgtacggtacaattcccag

SEQ ID NO: 79 - DNA, 96 bp, Artificial Sequence
  Mutation 3 for LIGCas-3 locus
aaggcgcaaatgagtagcagcgcacgtatatatacgcgtacgcgtactgtgaggtatatatatcctccgccggggcacgtacggtacaattcccag

SEQ ID NO: 80 - DNA, 95 bp, Artificial Sequence
  Mutation 4 for LIGCas-3 locus
aaggcgcaaatgagtagcagcgcacgtatatatacgcgtacgcgtacgtgaggtatatatatcctccgccggggcacgtacggtacaattcccag

SEQ ID NO: 81 - DNA, 68 bp, Artificial Sequence
  Mutation 5 for LIGCas-3 locus
aaggcgcaaatgagtagcagcgcacgtatatatatcctccgccggggcacgtacggtacaattcccag

SEQ ID NO: 82 - DNA, 55 bp, Artificial Sequence
  Mutation 6 for LIGCas-3 locus
aaggcgcaaatgagtagcagcgcacgtatatatacgcgtacggtacaattcccag

SEQ ID NO: 83 - DNA, 93 bp, Artificial Sequence
  Mutation 7 for LIGCas-3 locus
aaggcgcaaatgagtagcagcgcacgtatatatacgcgtacgcgtgtgaggtatatatatcctccgccggggcacgtacggtacaattcccag

SEQ ID NO: 84 - DNA, 69 bp, Artificial Sequence
  Mutation 8 for LIGCas-3 locus
aaggcgcaaatgagtagcagcgcacgtatatatacgcgtacgccggggcacgtacggtacaattcccag

SEQ ID NO: 85 - DNA, 66 bp, Artificial Sequence
  Mutation 9 for LIGCas-3 locus
aaggcgcaaatgagtagcagcgcacgtatatatcctccgccggggcacgtacggtacaattcccag

SEQ ID NO: 86 - DNA, 95 bp, Artificial Sequence
  Mutation 10 for LIGCas-3 locus
aaggcgcaaatgagtagcagcgcacgtatatatacgcgtacgcgtatgtgaggtatatatatcctccgccggggcacgtacggtacaattcccag

SEQ ID NO: 87 - DNA, 95 bp, Artificial Sequence
  Mutation 1 for LIG3-4 homing endonuclease locus
ccttcgcaaatgagtagcagcgcacgtatatatacgcgtacgcgtacgtgaggtatatatatcctccgccggggcacgtacggtacaattcccag

SEQ ID NO: 88 - DNA, 68 bp, Artificial Sequence
  Mutation 2 for LIG3-4 homing endonuclease locus
ccttcgcaaatgagtagcagcgcacgtatatatatcctccgccggggcacgtacggtacaattcccag

SEQ ID NO: 89 - DNA, 65 bp, Artificial Sequence
  Mutation 3 for LIG3-4 homing endonuclease locus
ccttcgcaaatgagtagcagcgcacgtatatatacgcgtacgcgtacgtacggtacaattcccag

SEQ ID NO: 90 - DNA, 55 bp, Artificial Sequence
  Mutation 4 for LIG3-4 homing endonuclease locus
ccttcgcaaatgagtagcagcgcacgtatatatacgcgtacggtacaattcccag

SEQ ID NO: 91 - DNA, 69 bp, Artificial Sequence
  Mutation 5 for LIG3-4 homing endonuclease locus
ccttcgcaaatgagtagcagcgcacgtatatatacgcgtacgccggggcacgtacggtacaattcccag

SEQ ID NO: 92 - DNA, 85 bp, Artificial Sequence
  Mutation 6 for LIG3-4 homing endonuclease locus
ccttcgcaaatgagtagcagcgcacgtatatatacgtgtgaggtatatatatcctccgccggggcacgtacggtacaattcccag

SEQ ID NO: 93 - DNA, 93 bp, Artificial Sequence
  Mutation 7 for LIG3-4 homing endonuclease locus
ccttcgcaaatgagtagcagcgcacgtatatatacgcgtacgcgtgtgaggtatatatatcctccgccggggcacgtacggtacaattcccag

SEQ ID NO: 94 - DNA, 66 bp, Artificial Sequence
  Mutation 8 for LIG3-4 homing endonuclease locus
ccttcgcaaatgagtagcagcgcacgtatatatcctccgccggggcacgtacggtacaattcccag

SEQ ID NO: 95 - DNA, 95 bp, Artificial Sequence
  Mutation 9 for LIG3-4 homing endonuclease locus
ccttcgcaaatgagtagcagcgcacgtatatatacgcgtacgcgtacgtgtggtatatatatcctccgccggggcacgtacggtacaattcccag

SEQ ID NO: 96 - DNA, 102 bp, Artificial Sequence
  Mutation 10 for LIG3-4 homing endonuclease locus
ccttcgcaaatgagtagcagcgcacgtatatatacgcgtacggtatatatacgtgtgaggtatatatatcctccgccggggcacgtacggtacaattcccag

SEQ ID NO: 97 - DNA, 5424 bp, Artificial Sequence
  donor DNA -HR Repair DNA
cccatagaaaactgtgtgctataatacaccaaaaggaaagcaaagtgaaaaggaaactttgaatagccaagaagactcggagtgcttcacgccttcacctatcccacataggtgatgagctaagagtaaaatgtagattctctcgagtactgaatattgcctgcacttttccttgcagtaaatacacctttaatccatgacgagagtccactctttgagtccgtcttgagattcttccattgatcatacaacatgacctcgaagtcctgatggagaacaacttatataattaaaactacaatacagaaagttcctgacaattaaaacctttggtggtggcatgccgtaggttaaaaaaaatagataatgacaacacaactggagacacgctctttgccgagtgctcacacgtttgctgagagcgagcactcggcaaatatatgatttgccgaataccaccctcctcggcaaaacaatacactaggcaaaaaggtagtttcccatcaccatgatgcccgccgttaatgtaccttctatgccgagtatgttggcgctcagcaaagagatcgttaccggcgtttgtttcaccaagagctctttgacgagtgtggcacacgacaaaaccttttgccgagtgtaattagtcgtttgccaagtgactggtgcagttggcaaaggagtcgtttattatgtgtgggcaaaatgatatatggtgccagttagggctagcaaattaaaggggggggggggggggttaggttgaagaaggtgacgagtaataaggtctcggacggccgcgcgcatatatatcagatccgatccaatggcacacggtgcaaacgaaaagcacgaaatttccaccagcttaattagggagagaaaaatagagcaccagctgatgagtgaatgaatgagatagacgggacacagagggtccagcaggctagcctactctggccgccctaaatagaagtcagtgccgtgacgacgcgcaaacttcttttgatcggctgcggaaataatatactgtaacgatttacgcacctgctgggaattgtaccgtacgtgccccggcggaggatatatatacctcacacaagggcgaattgtactagttagttagctagtcggtcctagatgccgtaatcattagctaatcgtaagtgacgcttggacacgagcggcttgagctaggaacctacgaagtcatcggaatcagctcaggtgtacagaagttcctatactttctggagaataggaacttcggaataggaacttcgtatacgctagggccgcattcgcaaaacacacctagactagatttgttttgctaacccaattgatattaattatatatgattaatatttatatgtatatggatttggttaatgaaatgcatctggttcatcaaagaattataaagacacgtgacattcatttaggataagaaatatggatgatctctttctcttttattcagataactagtaattacacataacacacaactttgatgcccacattatagtgattagcatgtcactatgtgtgcatccttttatttcatacattaattaagttggccaatccagaagatggacaagtctaggtttcgactcagatctgcgtcaccgggcgcaccgggcgcggcggggccggcagctcgaagtcgcgctgccagaagccgacgtcgtgccagccgccgtgcttgtagccggcggcgcggagggtgccgcgggcggtgtagccgagggcctcgtggaggcgcacggacgggtcgttcgggaggccgatcacggccaccacggacttgaagccctgggcctccatgctcttgaggaggtgggtgtagagggtggagccgaggccgaggcgctggtggcggtgggacacgtacacggtggactccacggtccagtcgtaggcgttgcgggccttccacgggccggcgtaggcgatgccggccaccacgccctccacctcggccacgagccacgggtagcggtcctggaggcgctccaggtcgtcgatccactcctgcggggtctgcggctcggtgcggaagttcacggtggaggtctcgatgtagtggttcacgatgtcgcacacggcggccatgtcggcggcggtggccgggcggatctcgacggggcggcgctcgggggacatggtgtcgtgtggatcccggtggatctgaagttcctatactttctagagaataggaacttcggaataggaacttcgctagcgaattgatcctctagagtcgacctgcagaagtaacaccaaacaacagggtgagcatcgacaaaagaaacagtaccaagcaaataaatagcgtatgaaggcagggctaaaaaaatccacatatagctgctgcatatgccatcatccaagtatatcaagatcaaaataattataaaacatacttgtttattataatagataggtactcaaggttagagcatatgaatagatgctgcatatgccatcatgtatatgcatcagtaaaacccacatcaacatgtatacctatcctagatcgatatttccatccatcttaaactcgtaactatgaagatgtatgacacacacatacagttccaaaattaataaatacaccaggtagtttgaaacagtattctactccgatctagaacgaatgaacgaccgcccaaccacaccacatcatcacaaccaagcgaacaaaaagcatctctgtatatgcatcagtaaaacccgcatcaacatgtatacctatcctagatcgatatttccatccatcatcttcaattcgtaactatgaatatgtatggcacacacatacagatccaaaattaataaatccaccaggtagtttgaaacagaattctactccgatctagaacgaccgcccaaccagaccacatcatcacaaccaagacaaaaaaaagcatgaaaagatgacccgacaaacaagtgcacggcatatattgaaataaaggaaaagggcaaaccaaaccctatgcaacgaaacaaaaaaaatcatgaaatcgatcccgtctgcggaacggctagagccatcccaggattccccaaagagaaacactggcaagttagcaatcagaacgtgtctgacgtacaggtcgcatccgtgtacgaacgctagcagcacggatctaacacaaacacggatctaacacaaacatgaacagaagtagaactaccgggccctaaccatgcatggaccggaacgccgatctagagaaggtagagaggggggggggggaggacgagcggcgtaccttgaagcggaggtgccgacgggtggatttgggggagatctggttgtgtgtgtgtgcgctccgaacaacacgaggttggggaaagagggtgtggagggggtgtctatttattacggcgggcgaggaagggaaagcgaaggagcggtgggaaaggaatcccccgtagctgccggtgccgtgagaggaggaggaggccgcctgccgtgccggctcacgtctgccgctccgccacgcaatttctggatgccgacagcggagcaagtccaacggtggagcggaactctcgagaggggtccagaggcagcgacagagatgccgtgccgtctgcttcgcttggcccgacgcgacgctgctggttcgctggttggtgtccgttagactcgtcgacggcgtttaacaggctggcattatctactcgaaacaagaaaaatgtttccttagtttttttaatttcttaaagggtatttgtttaatttttagtcactttattttattctattttatatctaaattattaaataaaaaaactaaaatagagttttagttttcttaatttagaggctaaaatagaataaaatagatgtactaaaaaaattagtctataaaaaccattaaccctaaaccctaaatggatgtactaataaaatggatgaagtattatataggtgaagctatttgcaaaaaaaaaggagaacacatgcacactaaaaagataaaactgtagagtcctgttgtcaaaatactcaattgtcctttagaccatgtctaactgttcatttatatgattctctaaaacactgatattattgtagtactatagattatattattcgtagagtaaagtttaaatatatgtataaagatagataaactgcacttcaaacaagtgtgacaaaaaaaatatgtggtaattttttataacttagacatgcaatgctcattatctctagagaggggcacgaccgggtcacgctgcactgcaggctagcggcgaattcgcccttgtacgcgtacgcgtatatatacgtgcgctgctactcatttgcgcgggaatacagctcagtctgctgtgcgctgcaggatgtacatacatacatgcgcaggtgcaaagtctacgcgcgcgggcaatgcaagcccctggcgtagttgggccatgactgagatcacgcctcatggtcatggaacgaaacaccgcgtccggccgggctgcccctggcgtcacgcgggaggcagctgctagcgttagcgtacgtacccaccgtctcgtacacaccaccgcagggagagagaagagcgatgcaatgcacatgtacagcatccgcatcatgcatagatactcatatcttcaaggccacacatgcagcagtgtcgtacgctacgttgtttcaacggaggaggaggatacatacatagacacccacagccagcctagcatatagcagatagcatacggactcccgggtgaggaaaaatggagggcgaaccaaaccaaccacaaagaagcagcagcagcagcagcagcagctgcggctgctatcaccactcaccaactccaattaaagatctctctctctctctctactggccggccctgtcagtgccagcgcccggtttgttgctagctgagctgcgggcgtcgctcttagatatagcccaaaactcactccaccaccactcgttccatggaaccctagaccaaaagtactcgcgctctcggccctcgctctcgccctctccctctccgcagcaaaagagatccggccggccgagaagggcgcgcgctagctgcccggctactagctggcgcccgcccgcgcatatatctgtgtcatcgccatcacccacaccatggcccggccggccaacaccgccgtattagctctgtctgtcgctcgtccacctgcgaccgactgagcgatcgatctccaccgagctctccgctaagcgctgtccttgccgccgtcctcccctccgtcccctacgcatccatttccgtgtgctcgtgtgtgcgcgcgcgggcactcctgctcctgctccctccggcccctcctcccctcccaggctcccagctagccgcgcccgcccgcgcgacctgcacctgcacagatcgggcggccgggccgaccgatcgatcgagat

SEQ ID NO: 98 - DNA, 24 bp, Artificial Sequence
  Forward PCR primer
cccgttattgtatgaggtaatgac

SEQ ID NO: 99 - DNA, 31 bp, Artificial Sequence
  Reverse PCR primer for site-specific transgene insertion at junction 1
gctcgtgtccaagcgtcacttacgattagct

SEQ ID NO: 100 - DNA, 32 bp, Artificial Sequence
  Forward PCR primer for site-specific transgene insertion at junction 2
ccatgtctaactgttcatttatatgattctct

SEQ ID NO: 101 - DNA, 24 bp, Artificial Sequence
  Reverse PCR primer for site-specific transgene insertion at junction 2
gcagccgataggttcatcatcttc

SEQ ID NO: 102 - DNA, 7850 bp, Artificial Sequence
  Linked Cas9 and LIGCas-3 long guide RNA expression cassettes
gtgcagcgtgacccggtcgtgcccctctctagagataatgagcattgcatgtctaagttataaaaaattaccacatattttttttgtcacacttgtttgaagtgcagtttatctatctttatacatatatttaaactttactctacgaataatataatctatagtactacaataatatcagtgttttagagaatcatataaatgaacagttagacatggtctaaaggacaattgagtattttgacaacaggactctacagttttatctttttagtgtgcatgtgttctcctttttttttgcaaatagcttcacctatataatacttcatccattttattagtacatccatttagggtttagggttaatggtttttatagactaatttttttagtacatctattttattctattttagcctctaaattaagaaaactaaaactctattttagtttttttatttaataatttagatataaaatagaataaaataaagtgactaaaaattaaacaaataccctttaagaaattaaaaaaactaaggaaacatttttcttgtttcgagtagataatgccagcctgttaaacgccgtcgacgagtctaacggacaccaaccagcgaaccagcagcgtcgcgtcgggccaagcgaagcagacggcacggcatctctgtcgctgcctctggacccctctcgagagttccgctccaccgttggacttgctccgctgtcggcatccagaaattgcgtggcggagcggcagacgtgagccggcacggcaggcggcctcctcctcctctcacggcaccggcagctacgggggattcctttcccaccgctccttcgctttcccttcctcgcccgccgtaataaatagacaccccctccacaccctctttccccaacctcgtgttgttcggagcgcacacacacacaaccagatctcccccaaatccacccgtcggcacctccgcttcaaggtacgccgctcgtcctcccccccccccctctctaccttctctagatcggcgttccggtccatgcatggttagggcccggtagttctacttctgttcatgtttgtgttagatccgtgtttgtgttagatccgtgctgctagcgttcgtacacggatgcgacctgtacgtcagacacgttctgattgctaacttgccagtgtttctctttggggaatcctgggatggctctagccgttccgcagacgggatcgatttcatgattttttttgtttcgttgcatagggtttggtttgcccttttcctttatttcaatatatgccgtgcacttgtttgtcgggtcatcttttcatgcttttttttgtcttggttgtgatgatgtggtctggttgggcggtcgttctagatcggagtagaattctgtttcaaactacctggtggatttattaattttggatctgtatgtgtgtgccatacatattcatagttacgaattgaagatgatggatggaaatatcgatctaggataggtatacatgttgatgcgggttttactgatgcatatacagagatgctttttgttcgcttggttgtgatgatgtggtgtggttgggcggtcgttcattcgttctagatcggagtagaatactgtttcaaactacctggtgtatttattaattttggaactgtatgtgtgtgtcatacatcttcatagttacgagtttaagatggatggaaatatcgatctaggataggtatacatgttgatgtgggttttactgatgcatatacatgatggcatatgcagcatctattcatatgctctaaccttgagtacctatctattataataaacaagtatgttttataattattttgatcttgatatacttggatgatggcatatgcagcagctatatgtggatttttttagccctgccttcatacgctatttatttgcttggtactgtttcttttgtcgatgctcaccctgttgtttggtgttacttctgcaggtcgactctagaggatccatggcaccgaagaagaagcgcaaggtgatggacaagaagtacagcatcggcctcgacatcggcaccaactcggtgggctgggccgtcatcacggacgaatataaggtcccgtcgaagaagttcaaggtcctcggcaatacagaccgccacagcatcaagaaaaacttgatcggcgccctcctgttcgatagcggcgagaccgcggaggcgaccaggctcaagaggaccgccaggagacggtacactaggcgcaagaacaggatctgctacctgcaggagatcttcagcaacgagatggcgaaggtggacgactccttcttccaccgcctggaggaatcattcctggtggaggaggacaagaagcatgagcggcacccaatcttcggcaacatcgtcgacgaggtaagtttctgcttctacctttgatatatatataataattatcattaattagtagtaatataatatttcaaatatttttttcaaaataaaagaatgtagtatatagcaattgcttttctgtagtttataagtgtgtatattttaatttataacttttctaatatatgaccaaaacatggtgatgtgcaggtggcctaccacgagaagtacccgacaatctaccacctccggaagaaactggtggacagcacagacaaggcggacctccggctcatctaccttgccctcgcgcatatgatcaagttccgcggccacttcctcatcgagggcgacctgaacccggacaactccgacgtggacaagctgttcatccagctcgtgcagacgtacaatcaactgttcgaggagaaccccataaacgctagcggcgtggacgccaaggccatcctctcggccaggctctcgaaatcaagaaggctggagaaccttatcgcgcagttgccaggcgaaaagaagaacggcctcttcggcaaccttattgcgctcagcctcggcctgacgccgaacttcaaatcaaacttcgacctcgcggaggacgccaagctccagctctcaaaggacacctacgacgacgacctcgacaacctcctggcccagataggagaccagtacgcggacctcttcctcgccgccaagaacctctccgacgctatcctgctcagcgacatccttcgggtcaacaccgaaattaccaaggcaccgctgtccgccagcatgattaaacgctacgacgagcaccatcaggacctcacgctgctcaaggcactcgtccgccagcagctccccgagaagtacaaggagatcttcttcgaccaatcaaaaaacggctacgcgggatatatcgacggcggtgccagccaggaagagttctacaagttcatcaaaccaatcctggagaagatggacggcaccgaggagttgctggtcaagctcaacagggaggacctcctcaggaagcagaggaccttcgacaacggctccatcccgcatcagatccacctgggcgaactgcatgccatcctgcggcgccaggaggacttctacccgttcctgaaggataaccgggagaagatcgagaagatcttgacgttccgcatcccatactacgtgggcccgctggctcgcggcaactcccggttcgcctggatgacccggaagtcggaggagaccatcacaccctggaactttgaggaggtggtcgataagggcgctagcgctcagagcttcatcgagcgcatgaccaacttcgataaaaacctgcccaatgaaaaagtcctccccaagcactcgctgctctacgagtacttcaccgtgtacaacgagctcaccaaggtcaaatacgtcaccgagggcatgcggaagccggcgttcctgagcggcgagcagaagaaggcgatagtggacctcctcttcaagaccaacaggaaggtgaccgtgaagcaattaaaagaggactacttcaagaaaatagagtgcttcgactccgtggagatctcgggcgtggaggatcggttcaacgcctcactcggcacgtatcacgacctcctcaagatcattaaagacaaggacttcctcgacaacgaggagaacgaggacatcctcgaggacatcgtcctcaccctgaccctgttcgaggaccgcgaaatgatcgaggagaggctgaagacctacgcgcacctgttcgacgacaaggtcatgaaacagctcaagaggcgccgctacactggttggggaaggctgtcccgcaagctcattaatggcatcagggacaagcagagcggcaagaccatcctggacttcctcaagtccgacgggttcgccaaccgcaacttcatgcagctcattcacgacgactcgctcacgttcaaggaagacatccagaaggcacaggtgagcgggcagggtgactccctccacgaacacatcgccaacctggccggctcgccggccattaaaaagggcatcctgcagacggtcaaggtcgtcgacgagctcgtgaaggtgatgggccggcacaagcccgaaaatatcgtcatagagatggccagggagaaccagaccacccaaaaagggcagaagaactcgcgcgagcggatgaaacggatcgaggagggcattaaagagctcgggtcccagatcctgaaggagcaccccgtggaaaatacccagctccagaatgaaaagctctacctctactacctgcagaacggccgcgacatgtacgtggaccaggagctggacattaatcggctatcggactacgacgtcgaccacatcgtgccgcagtcgttcctcaaggacgatagcatcgacaacaaggtgctcacccggtcggataaaaatcggggcaagagcgacaacgtgcccagcgaggaggtcgtgaagaagatgaaaaactactggcgccagctcctcaacgcgaaactgatcacccagcgcaagttcgacaacctgacgaaggcggaacgcggtggcttgagcgaactcgataaggcgggcttcataaaaaggcagctggtcgagacgcgccagatcacgaagcatgtcgcccagatcctggacagccgcatgaatactaagtacgatgaaaacgacaagctgatccgggaggtgaaggtgatcacgctgaagtccaagctcgtgtcggacttccgcaaggacttccagttctacaaggtccgcgagatcaacaactaccaccacgcccacgacgcctacctgaatgcggtggtcgggaccgccctgatcaagaagtacccgaagctggagtcggagttcgtgtacggcgactacaaggtctacgacgtgcgcaaaatgatcgccaagtccgagcaggagatcggcaaggccacggcaaaatacttcttctactcgaacatcatgaacttcttcaagaccgagatcaccctcgcgaacggcgagatccgcaagcgcccgctcatcgaaaccaacggcgagacgggcgagatcgtctgggataagggccgggatttcgcgacggtccgcaaggtgctctccatgccgcaagtcaatatcgtgaaaaagacggaggtccagacgggcgggttcagcaaggagtccatcctcccgaagcgcaactccgacaagctcatcgcgaggaagaaggattgggacccgaaaaaatatggcggcttcgacagcccgaccgtcgcatacagcgtcctcgtcgtggcgaaggtggagaagggcaagtcaaagaagctcaagtccgtgaaggagctgctcgggatcacgattatggagcggtcctccttcgagaagaacccgatcgacttcctagaggccaagggatataaggaggtcaagaaggacctgattattaaactgccgaagtactcgctcttcgagctggaaaacggccgcaagaggatgctcgcctccgcaggcgagttgcagaagggcaacgagctcgccctcccgagcaaatacgtcaatttcctgtacctcgctagccactatgaaaagctcaagggcagcccggaggacaacgagcagaagcagctcttcgtggagcagcacaagcattacctggacgagatcatcgagcagatcagcgagttctcgaagcgggtgatcctcgccgacgcgaacctggacaaggtgctgtcggcatataacaagcaccgcgacaaaccaatacgcgagcaggccgaaaatatcatccacctcttcaccctcaccaacctcggcgctccggcagccttcaagtacttcgacaccacgattgaccggaagcggtacacgagcacgaaggaggtgctcgatgcgacgctgatccaccagagcatcacagggctctatgaaacacgcatcgacctgagccagctgggcggagacaagagaccacgggaccgccacgatggcgagctgggaggccgcaagcgggcaaggtaggtaccgttaacctagacttgtccatcttctggattggccaacttaattaatgtatgaaataaaaggatgcacacatagtgacatgctaatcactataatgtgggcatcaaagttgtgtgttatgtgtaattactagttatctgaataaaagagaaagagatcatccatatttcttatcctaaatgaatgtcacgtgtctttataattctttgatgaaccagatgcatttcattaaccaaatccatatacatataaatattaatcatatataattaatatcaattgggttagcaaaacaaatctagtctaggtgtgttttgcgaatgcggccccccctcgaggtcgacggtatcgataagctttgagagtacaatgatgaacctagattaatcaatgccaaagtctgaaaaatgcaccctcagtctatgatccagaaaatcaagattgcttgaggccctgttcggttgttccggattagagccccggattaattcctagccggattacttctctaatttatatagattttgatgagctggaatgaatcctggcttattccggtacaaccgaacaggccctgaaggataccagtaatcgctgagctaaattggcatgctgtcagagtgtcagtattgcagcaaggtagtgagataaccggcatcatggtgccagtttgatggcaccattagggttagagatggtggccatgggcgcatgtcctggccaactttgtatgatatatggcagggtgaataggaaagtaaaattgtattgtaaaaagggatttcttctgtttgttagcgcatgtacaaggaatgcaagttttgagcgagggggcatcaaagatctggctgtgtttccagctgtttttgttagccccatcgaatccttgacataatgatcccgcttaaataagcaacctcgcttgtatagttccttgtgctctaacacacgatgatgataagtcgtaaaatagtggtgtccaaagaatttccaggcccagttgtaaaagctaaaatgctattcgaatttctactagcagtaagtcgtgtttagaaattatttttttatataccttttttccttctatgtacagtaggacacagtgtcagcgccgcgttgacggagaatatttgcaaaaaagtaaaagagaaagtcatagcggcgtatgtgccaaaaacttcgtcacagagagggccataagaaacatggcccacggcccaatacgaagcaccgcgacgaagcccaaacagcagtccgtaggtggagcaaagcgctgggtaatacgcaaacgttttgtcccaccttgactaatcacaagagtggagcgtaccttataaaccgagccgcaagcaccgaattgcgtacgcgtacgtgtggttttagagctagaaatagcaagttaaaataaggctagtccgttatcaacttgaaaaagtggcaccgagtcggtgcttttttttt

SEQ ID NO: 103 - DNA, 23 bp, Zea mays
tgggcaggtctcacgacggttgg

SEQ ID NO: 104 - DNA, 91 bp, Zea mays
ccggtttcgcgtgctctggctttacattacatgggcaggtctcacgacggttgggctggagagccggctggtaggggaggacctcaacggc

SEQ ID NO: 105 - DNA, 90 bp, Artificial Sequence
  Mutation 1 for 55CasRNA-1 locus
ccggtttcgcgtgctctggctttacattacatgggcaggtctcacgaggttgggctggagagccggctggtaggggaggacctcaacggc

SEQ ID NO: 106 - DNA, 90 bp, Artificial Sequence
  Mutation 2 for 55CasRNA-1 locus
ccggtttcgcgtgctctggctttacattacatgggcaggtctcacacggttgggctggagagccggctggtaggggaggacctcaacggc

SEQ ID NO: 107 - DNA, 92 bp, Artificial Sequence
  Mutation 3 for 55CasRNA-1 locus
ccggtttcgcgtgctctggctttacattacatgggcaggtctcacgacggtttgggctggagagccggctggtaggggaggacctcaacggc

SEQ ID NO: 108 - DNA, 89 bp, Artificial Sequence
  Mutation 4 for 55CasRNA-1 locus
ccggtttcgcgtgctctggctttacattgcatgagcaggtcgtgacggttgggctggagagccggctggtaggggaggacctcaacggc

SEQ ID NO: 109 - DNA, 57 bp, Artificial Sequence
  Mutation 5 for 55CasRNA-1 locus
gggcaggtctcgacggttgggctggagagccggctggtaggggaggacctcaacggc

SEQ ID NO: 110 - DNA, 57 bp, Artificial Sequence
  Mutation 6 for 55CasRNA-1 locus
ccggtttcgcgtgctcttgggctggagagccggctggtaggggaggacctcaacggc

SEQ ID NO: 111 - DNA, 22 bp, Zea mays
atatacctcacacgtacgcgta

SEQ ID NO: 112 - DNA, 1053 bp, Zea mays
atgaacaccaagtacaacaaggagttcctgctctacctggccggcttcgtggacggcgacggctccatcaaggcgcagatcaagccgaaccagtcctgcaagttcaagcaccagctctccctgaccttccaggtgacccagaagacgcagaggcgctggttcctcgacaagctggtcgacgagatcggggtgggctacgtctacgaccgcgggtcggtgtccgactacgagctctcccagatcaagcccctgcacaacttcctcacccagctccagccgttcctcaagctgaagcagaagcaggcgaacctcgtcctgaagatcatcgagcagctcccctcggccaaggagtccccggacaagttcctggaggtgtgcacgtgggtcgaccagatcgcggccctcaacgacagcaagacccgcaagacgacctcggagacggtgcgggcggtcctggactccctcccaggatccgtgggaggtctatcgccatctcaggcatccagcgccgcatcctcggcttcctcaagcccgggttcagggatctccgaagcactcagagctggagcaactaagtccaaggaattcctgctctacctggccggcttcgtggacggcgacggctccatcatcgcgtccatcaagccgcgccagtgctacaagttcaagcacgagctccgcctggagttcaccgtgacccagaagacgcagaggcgctggttcctcgacaagctggtcgacgagatcggggtgggctacgtctacgaccgcgggtcggtgtccgactaccgcctctcccagatcaagcccctgcacaacttcctcacccagctccagccgttcctcaagctgaagcagaagcaggcgaacctcgtcctgaagatcatcgagcagctcccctcggccaaggagtccccggacaagttcctggaggtgtgcacgtgggtcgaccagatcgcggccctcaacgacagcaagacccgcaagacgacctcggagacggtgcgggcggtcctggactccctcagcgagaagaagaagtcgtccccctga

SEQ ID NO: 113 - DNA, 22 bp, Zea mays
gatggtgacgtacgtgccctac

SEQ ID NO: 114 - DNA, 1053 bp, Zea mays
atgaacaccaagtacaacaaggagttcctcctctacctggcaggtttcgtggacggcgatgggtctatcatcgcccagattaccccgcaacagtcctacaagttcaagcacgccctgcggctgaggttcacggtcactcagaagacgcagcgcaggtggttcctcgataagctggtcgacgaaatcggagtcggcaaggtgcgggacaggggctctgtcagcgactacatcctctcccagaagaagccgctccacaacttcctgacccagctgcagcccttcctcaagctcaagcagaagcaggccaacctggtgctcaagatcatcgagcagctgccatctgccaaggagtcaccagacaagttccttgaggtctgcacctgggtcgatcagatcgctgccctgaacgactccaagacgaggaagaccacctccgagaccgtcagggctgtgctggactcactcccaggatccgttggcggtctcagcccttctcaggctagctcggctgcttcctcagccagcagctcacctggctccggtatcagcgaggctctcagagcaggtgccaccaagtccaaggagttcctcctgtacctggcaggcttcgttgacggcgacggctcgatcatggcgtccattaccccgaaccagtcgtgtaagttcaagcatcagctgcgcctgcgctttaccgtcacgcagaagacccagaggcgctggttcctggacaaactggtggacgagatcggggtcgggaaggtgtacgacagagggagcgttagcgactaccggctgtcccagaagaagccgctccacaacttcctgacgcagctccaacccttcctgaagctgaagcagaagcaggcgaaccttgtgctgaagatcattgagcagctgccgagcgccaaggagagccctgacaagttcctggaggtctgcacctgggtcgaccagatcgctgccctcaacgactccaagaccaggaagaccacgagcgagaccgttcgggctgtcctggacagcctctccgagaagaagaagtcgagcccgtag

SEQ ID NO: 115 - DNA, 4104 bp, Artificial sequence
  soybean codon optimized Cas9
atggacaaaaagtactcaatagggctcgacatagggactaactccgttggatgggccgtcatcaccgacgagtacaaggtgccctccaagaagttcaaggtgttgggaaacaccgacaggcacagcataaagaagaatttgatcggtgccctcctcttcgactccggagagaccgctgaggctaccaggctcaagaggaccgctagaaggcgctacaccagaaggaagaacagaatctgctacctgcaggagatcttctccaacgagatggccaaggtggacgactccttcttccaccgccttgaggaatcattcctggtggaggaggataaaaagcacgagagacacccaatcttcgggaacatcgtcgacgaggtggcctaccatgaaaagtaccctaccatctaccacctgaggaagaagctggtcgactctaccgacaaggctgacttgcgcttgatttacctggctctcgctcacatgataaagttccgcggacacttcctcattgagggagacctgaacccagacaactccgacgtggacaagctcttcatccagctcgttcagacctacaaccagcttttcgaggagaacccaatcaacgccagtggagttgacgccaaggctatcctctctgctcgtctgtcaaagtccaggaggcttgagaacttgattgcccagctgcctggcgaaaagaagaacggactgttcggaaacttgatcgctctctccctgggattgactcccaacttcaagtccaacttcgacctcgccgaggacgctaagttgcagttgtctaaagacacctacgacgatgacctcgacaacttgctggcccagataggcgaccaatacgccgatctcttcctcgccgctaagaacttgtccgacgcaatcctgctgtccgacatcctgagagtcaacactgagattaccaaagctcctctgtctgcttccatgattaagcgctacgacgagcaccaccaagatctgaccctgctcaaggccctggtgagacagcagctgcccgagaagtacaaggagatctttttcgaccagtccaagaacggctacgccggatacattgacggaggcgcctcccaggaagagttctacaagttcatcaagcccatccttgagaagatggacggtaccgaggagctgttggtgaagttgaacagagaggacctgttgaggaagcagagaaccttcgacaacggaagcatccctcaccaaatccacctgggagagctccacgccatcttgaggaggcaggaggatttctatcccttcctgaaggacaaccgcgagaagattgagaagatcttgaccttcagaattccttactacgtcgggccactcgccagaggaaactctaggttcgcctggatgacccgcaaatctgaagagaccattactccctggaacttcgaggaagtcgtggacaagggcgcttccgctcagtctttcatcgagaggatgaccaacttcgataaaaatctgcccaacgagaaggtgctgcccaagcactccctgttgtacgagtatttcacagtgtacaacgagctcaccaaggtgaagtacgtcacagagggaatgaggaagcctgccttcttgtccggagagcagaagaaggccatcgtcgacctgctcttcaagaccaacaggaaggtgactgtcaagcagctgaaggaggactacttcaagaagatcgagtgcttcgactccgtcgagatctctggtgtcgaggacaggttcaacgcctcccttgggacttaccacgatctgctcaagattattaaagacaaggacttcctggacaacgaggagaacgaggacatccttgaggacatcgtgctcaccctgaccttgttcgaagacagggaaatgatcgaagagaggctcaagacctacgcccacctcttcgacgacaaggtgatgaaacagctgaagagacgcagatataccggctggggaaggctctcccgcaaattgatcaacgggatcagggacaagcagtcagggaagactatactcgacttcctgaagtccgacggattcgccaacaggaacttcatgcagctcattcacgacgactccttgaccttcaaggaggacatccagaaggctcaggtgtctggacagggtgactccttgcatgagcacattgctaacttggccggctctcccgctattaagaagggcattttgcagaccgtgaaggtcgttgacgagctcgtgaaggtgatgggacgccacaagccagagaacatcgttattgagatggctcgcgagaaccaaactacccagaaagggcagaagaattcccgcgagaggatgaagcgcattgaggagggcataaaagagcttggctctcagatcctcaaggagcaccccgtcgagaacactcagctgcagaacgagaagctgtacctgtactacctccaaaacggaagggacatgtacgtggaccaggagctggacatcaacaggttgtccgactacgacgtcgaccacatcgtgcctcagtccttcctgaaggatgactccatcgacaataaagtgctgacacgctccgataaaaatagaggcaagtccgacaacgtcccctccgaggaggtcgtgaagaagatgaaaaactactggagacagctcttgaacgccaagctcatcacccagcgtaagttcgacaacctgactaaggctgagagaggaggattgtccgagctcgataaggccggattcatcaagagacagctcgtcgaaacccgccaaattaccaagcacgtggcccaaattctggattcccgcatgaacaccaagtacgatgaaaatgacaagctgatccgcgaggtcaaggtgatcaccttgaagtccaagctggtctccgacttccgcaaggacttccagttctacaaggtgagggagatcaacaactaccaccacgcacacgacgcctacctcaacgctgtcgttggaaccgccctcatcaaaaaatatcctaagctggagtctgagttcgtctacggcgactacaaggtgtacgacgtgaggaagatgatcgctaagtctgagcaggagatcggcaaggccaccgccaagtacttcttctactccaacatcatgaacttcttcaagaccgagatcactctcgccaacggtgagatcaggaagcgcccactgatcgagaccaacggtgagactggagagatcgtgtgggacaaagggagggatttcgctactgtgaggaaggtgctctccatgcctcaggtgaacatcgtcaagaagaccgaagttcagaccggaggattctccaaggagtccatcctccccaagagaaactccgacaagctgatcgctagaaagaaagactgggaccctaagaagtacggaggcttcgattctcctaccgtggcctactctgtgctggtcgtggccaaggtggagaagggcaagtccaagaagctgaaatccgtcaaggagctcctcgggattaccatcatggagaggagttccttcgagaagaaccctatcgacttcctggaggccaagggatataaagaggtgaagaaggacctcatcatcaagctgcccaagtactccctcttcgagttggagaacggaaggaagaggatgctggcttctgccggagagttgcagaagggaaatgagctcgcccttccctccaagtacgtgaacttcctgtacctcgcctctcactatgaaaagttgaagggctctcctgaggacaacgagcagaagcagctcttcgtggagcagcacaagcactacctggacgaaattatcgagcagatctctgagttctccaagcgcgtgatattggccgacgccaacctcgacaaggtgctgtccgcctacaacaagcacagggataagcccattcgcgagcaggctgaaaacattatccacctgtttaccctcacaaacttgggagcccctgctgccttcaagtacttcgacaccaccattgacaggaagagatacacctccaccaaggaggtgctcgacgcaacactcatccaccaatccatcaccggcctctatgaaacaaggattgacttgtcccagctgggaggcgac

SEQ ID NO: 116 - DNA, 1503 bp, Glycine max
ccgggtttacttattttgtgggtatctatacttttattagatttttaatcaggctcctgatttctttttatttcgattgaattcctgaacttgtattattcagtagatcgaataaattataaaaagataaaatcataaaataatattttatcctatcaatcatattaaagcaatgaatatgtaaaattaatcttatctttattttaaaaaatcatataggtttagtatttttttaaaaataaagataggattagttttactattcactgcttattacttttaaaaaaatcataaaggtttagtatttttttaaaataaatataggaatagttttactattcactgctttaatagaaaaatagtttaaaatttaagatagttttaatcccagcatttgccacgtttgaacgtgagccgaaacgatgtcgttacattatcttaacctagctgaaacgatgtcgtcataatatcgccaaatgccaactggactacgtcgaacccacaaatcccacaaagcgcgtgaaatcaaatcgctcaaaccacaaaaaagaacaacgcgtttgttacacgctcaatcccacgcgagtagagcacagtaaccttcaaataagcgaatggggcataatcagaaatccgaaataaacctaggggcattatcggaaatgaaaagtagctcactcaatataaaaatctaggaaccctagttttcgttatcactctgtgctccctcgctctatttctcagtctctgtgtttgcggctgaggattccgaacgagtgaccttcttcgtttctcgcaaaggtaacagcctctgctcttgtctcttcgattcgatctatgcctgtctcttatttacgatgatgtttcttcggttatgtttttttatttatgctttatgctgttgatgttcggttgtttgtttcgctttgtttttgtggttcagttttttaggattcttttggtttttgaatcgattaatcggaagagattttcgagttatttggtgtgttggaggtgaatcttttttttgaggtcatagatctgttgtatttgtgttataaacatgcgactttgtatgattttttacgaggttatgatgttctggttgttttattatgaatctgttgagacagaaccatgatttttgttgatgttcgtttacactattaaaggtttgttttaacaggattaaaagttttttaagcatgttgaaggagtcttgtagatatgtaaccgtcgatagtttttttgtgggtttgttcacatgttatcaagcttaatcttttactatgtatgcgaccatatctggatccagcaaaggcgattttttaattccttgtgaaacttttgtaatatgaagttgaaattttgttattggtaaactataaatgtgtgaagttggagtatacctttaccttcttatttggctttgtgatagtttaatttatatgtattttgagttctgacttgtatttctttgaattgattctagtttaagtaatc

SEQ ID NO: 117 - DNA, 33 bp, Artificial sequence
  linker SV40 NLS
tctagagccgatcccaagaagaagagaaaggtg

SEQ ID NO: 118 - protein, 1379 aa, Artificial sequence
  Cas9 with a SV40 NLS
MDKKYSIGLDIGTNSVGWAVITDEYKVPSKKFKVLGNTDRHSIKKNLIGALLFDSGETAEATRLKRTARRRYTRRKNRICYLQEIFSNEMAKVDDSFFHRLEESFLVEEDKKHERHPIFGNIVDEVAYHEKYPTIYHLRKKLVDSTDKADLRLIYLALAHMIKFRGHFLIEGDLNPDNSDVDKLFIQLVQTYNQLFEENPINASGVDAKAILSARLSKSRRLENLIAQLPGEKKNGLFGNLIALSLGLTPNFKSNFDLAEDAKLQLSKDTYDDDLDNLLAQIGDQYADLFLAAKNLSDAILLSDILRVNTEITKAPLSASMIKRYDEHHQDLTLLKALVRQQLPEKYKEIFFDQSKNGYAGYIDGGASQEEFYKFIKPILEKMDGTEELLVKLNREDLLRKQRTFDNGSIPHQIHLGELHAILRRQEDFYPFLKDNREKIEKILTFRIPYYVGPLARGNSRFAWMTRKSEETITPWNFEEVVDKGASAQSFIERMTNFDKNLPNEKVLPKHSLLYEYFTVYNELTKVKYVTEGMRKPAFLSGEQKKAIVDLLFKTNRKVTVKQLKEDYFKKIECFDSVEISGVEDRFNASLGTYHDLLKIIKDKDFLDNEENEDILEDIVLTLTLFEDREMIEERLKTYAHLFDDKVMKQLKRRRYTGWGRLSRKLINGIRDKQSGKTILDFLKSDGFANRNFMQLIHDDSLTFKEDIQKAQVSGQGDSLHEHIANLAGSPAIKKGILQTVKVVDELVKVMGRHKPENIVIEMARENQTTQKGQKNSRERMKRIEEGIKELGSQILKEHPVENTQLQNEKLYLYYLQNGRDMYVDQELDINRLSDYDVDHIVPQSFLKDDSIDNKVLTRSDKNRGKSDNVPSEEVVKKMKNYWRQLLNAKLITQRKFDNLTKAERGGLSELDKAGFIKRQLVETRQITKHVAQILDSRMNTKYDENDKLIREVKVITLKSKLVSDFRKDFQFYKVREINNYHHAHDAYLNAVVGTALIKKYPKLESEFVYGDYKVYDVRKMIAKSEQEIGKATAKYFFYSNIMNFFKTEITLANGEIRKRPLIETNGETGEIVWDKGRDFATVRKVLSMPQVNIVKKTEVQTGGFSKESILPKRNSDKLIARKKDWDPKKYGGFDSPTVAYSVLVVAKVEKGKSKKLKSVKELLGITIMERSSFEKNPIDFLEAKGYKEVKKDLIIKLPKYSLFELENGRKRMLASAGELQKGNELALPSKYVNFLYLASHYEKLKGSPEDNEQKQLFVEQHKHYLDEIIEQISEFSKRVILADANLDKVLSAYNKHRDKPIREQAENIIHLFTLTNLGAPAAFKYFDTTIDRKRYTSTKEVLDATLIHQSITGLYETRIDLSQLGGDSRADPKKKRKV

SEQ ID NO: 119 - DNA, 8519 bp, Artificial sequence
  QC782
ccgggtttacttattttgtgggtatctatacttttattagatttttaatcaggctcctgatttctttttatttcgattgaattcctgaacttgtattattcagtagatcgaataaattataaaaagataaaatcataaaataatattttatcctatcaatcatattaaagcaatgaatatgtaaaattaatcttatctttattttaaaaaatcatataggtttagtatttttttaaaaataaagataggattagttttactattcactgcttattacttttaaaaaaatcataaaggtttagtatttttttaaaataaatataggaatagttttactattcactgctttaatagaaaaatagtttaaaatttaagatagttttaatcccagcatttgccacgtttgaacgtgagccgaaacgatgtcgttacattatcttaacctagctgaaacgatgtcgtcataatatcgccaaatgccaactggactacgtcgaacccacaaatcccacaaagcgcgtgaaatcaaatcgctcaaaccacaaaaaagaacaacgcgtttgttacacgctcaatcccacgcgagtagagcacagtaaccttcaaataagcgaatggggcataatcagaaatccgaaataaacctaggggcattatcggaaatgaaaagtagctcactcaatataaaaatctaggaaccctagttttcgttatcactctgtgctccctcgctctatttctcagtctctgtgtttgcggctgaggattccgaacgagtgaccttcttcgtttctcgcaaaggtaacagcctctgctcttgtctcttcgattcgatctatgcctgtctcttatttacgatgatgtttcttcggttatgtttttttatttatgctttatgctgttgatgttcggttgtttgtttcgctttgtttttgtggttcagttttttaggattcttttggtttttgaatcgattaatcggaagagattttcgagttatttggtgtgttggaggtgaatcttttttttgaggtcatagatctgttgtatttgtgttataaacatgcgactttgtatgattttttacgaggttatgatgttctggttgttttattatgaatctgttgagacagaaccatgatttttgttgatgttcgtttacactattaaaggtttgttttaacaggattaaaagttttttaagcatgttgaaggagtcttgtagatatgtaaccgtcgatagtttttttgtgggtttgttcacatgttatcaagcttaatcttttactatgtatgcgaccatatctggatccagcaaaggcgattttttaattccttgtgaaacttttgtaatatgaagttgaaattttgttattggtaaactataaatgtgtgaagttggagtatacctttaccttcttatttggctttgtgatagtttaatttatatgtattttgagttctgacttgtatttctttgaattgattctagtttaagtaatccatggacaaaaagtactcaatagggctcgacatagggactaactccgttggatgggccgtcatcaccgacgagtacaaggtgccctccaagaagttcaaggtgttgggaaacaccgacaggcacagcataaagaagaatttgatcggtgccctcctcttcgactccggagagaccgctgaggctaccaggctcaagaggaccgctagaaggcgctacaccagaaggaagaacagaatctgctacctgcaggagatcttctccaacgagatggccaaggtggacgactccttcttccaccgccttgaggaatcattcctggtggaggaggataaaaagcacgagagacacccaatcttcgggaacatcgtcgacgaggtggcctaccatgaaaagtaccctaccatctaccacctgaggaagaagctggtcgactctaccgacaaggctgacttgcgcttgatttacctggctctcgctcacatgataaagttccgcggacacttcctcattgagggagacctgaacccagacaactccgacgtggacaagctcttcatccagctcgttcagacctacaaccagcttttcgaggagaacccaatcaacgccagtggagttgacgccaaggctatcctctctgctcgtctgtcaaagtccaggaggcttgagaacttgattgcccagctgcctggcgaaaagaagaacggactgttcggaaacttgatcgctctctccctgggattgactcccaacttcaagtccaacttcgacctcgccgaggacgctaagttgcagttgtctaaagacacctacgacgatgacctcgacaacttgctggcccagataggcgaccaatacgccgatctcttcctcgccgctaagaacttgtccgacgcaatcctgctgtccgacatcctgagagtcaacactgagattaccaaagctcctctgtctgcttccatgattaagcgctacgacgagcaccaccaagatctgaccctgctcaaggccctggtgagacagcagctgcccgagaagtacaaggagatctttttcgaccagtccaagaacggctacgccggatacattgacggaggcgcctcccaggaagagttctacaagttcatcaagcccatccttgagaagatggacggtaccgaggagctgttggtgaagttgaacagagaggacctgttgaggaagcagagaaccttcgacaacggaagcatccctcaccaaatccacctgggagagctccacgccatcttgaggaggcaggaggatttctatcccttcctgaaggacaaccgcgagaagattgagaagatcttgaccttcagaattccttactacgtcgggccactcgccagaggaaactctaggttcgcctggatgacccgcaaatctgaagagaccattactccctggaacttcgaggaagtcgtggacaagggcgcttccgctcagtctttcatcgagaggatgaccaacttcgataaaaatctgcccaacgagaaggtgctgcccaagcactccctgttgtacgagtatttcacagtgtacaacgagctcaccaaggtgaagtacgtcacagagggaatgaggaagcctgccttcttgtccggagagcagaagaaggccatcgtcgacctgctcttcaagaccaacaggaaggtgactgtcaagcagctgaaggaggactacttcaagaagatcgagtgcttcgactccgtcgagatctctggtgtcgaggacaggttcaacgcctcccttgggacttaccacgatctgctcaagattattaaagacaaggacttcctggacaacgaggagaacgaggacatccttgaggacatcgtgctcaccctgaccttgttcgaagacagggaaatgatcgaagagaggctcaagacctacgcccacctcttcgacgacaaggtgatgaaacagctgaagagacgcagatataccggctggggaaggctctcccgcaaattgatcaacgggatcagggacaagcagtcagggaagactatactcgacttcctgaagtccgacggattcgccaacaggaacttcatgcagctcattcacgacgactccttgaccttcaaggaggacatccagaaggctcaggtgtctggacagggtgactccttgcatgagcacattgctaacttggccggctctcccgctattaagaagggcattttgcagaccgtgaaggtcgttgacgagctcgtgaaggtgatgggacgccacaagccagagaacatcgttattgagatggctcgcgagaaccaaactacccagaaagggcagaagaattcccgcgagaggatgaagcgcattgaggagggcataaaagagcttggctctcagatcctcaaggagcaccccgtcgagaacactcagctgcagaacgagaagctgtacctgtactacctccaaaacggaagggacatgtacgtggaccaggagctggacatcaacaggttgtccgactacgacgtcgaccacatcgtgcctcagtccttcctgaaggatgactccatcgacaataaagtgctgacacgctccgataaaaatagaggcaagtccgacaacgtcccctccgaggaggtcgtgaagaagatgaaaaactactggagacagctcttgaacgccaagctcatcacccagcgtaagttcgacaacctgactaaggctgagagaggaggattgtccgagctcgataaggccggattcatcaagagacagctcgtcgaaacccgccaaattaccaagcacgtggcccaaattctggattcccgcatgaacaccaagtacgatgaaaatgacaagctgatccgcgaggtcaaggtgatcaccttgaagtccaagctggtctccgacttccgcaaggacttccagttctacaaggtgagggagatcaacaactaccaccacgcacacgacgcctacctcaacgctgtcgttggaaccgccctcatcaaaaaatatcctaagctggagtctgagttcgtctacggcgactacaaggtgtacgacgtgaggaagatgatcgctaagtctgagcaggagatcggcaaggccaccgccaagtacttcttctactccaacatcatgaacttcttcaagaccgagatcactctcgccaacggtgagatcaggaagcgcccactgatcgagaccaacggtgagactggagagatcgtgtgggacaaagggagggatttcgctactgtgaggaaggtgctctccatgcctcaggtgaacatcgtcaagaagaccgaagttcagaccggaggattctccaaggagtccatcctccccaagagaaactccgacaagctgatcgctagaaagaaagactgggaccctaagaagtacggaggcttcgattctcctaccgtggcctactctgtgctggtcgtggccaaggtggagaagggcaagtccaagaagctgaaatccgtcaaggagctcctcgggattaccatcatggagaggagttccttcgagaagaaccctatcgacttcctggaggccaagggatataaagaggtgaagaaggacctcatcatcaagctgcccaagtactccctcttcgagttggagaacggaaggaagaggatgctggcttctgccggagagttgcagaagggaaatgagctcgcccttccctccaagtacgtgaacttcctgtacctcgcctctcactatgaaaagttgaagggctctcctgaggacaacgagcagaagcagctcttcgtggagcagcacaagcactacctggacgaaattatcgagcagatctctgagttctccaagcgcgtgatattggccgacgccaacctcgacaaggtgctgtccgcctacaacaagcacagggataagcccattcgcgagcaggctgaaaacattatccacctgtttaccctcacaaacttgggagcccctgctgccttcaagtacttcgacaccaccattgacaggaagagatacacctccaccaaggaggtgctcgacgcaacactcatccaccaatccatcaccggcctctatgaaacaaggattgacttgtcccagctgggaggcgactctagagccgatcccaagaagaagagaaaggtgtaggttaacctagacttgtccatcttctggattggccaacttaattaatgtatgaaataaaaggatgcacacatagtgacatgctaatcactataatgtgggcatcaaagttgtgtgttatgtgtaattactagttatctgaataaaagagaaagagatcatccatatttcttatcctaaatgaatgtcacgtgtctttataattctttgatgaaccagatgcatttcattaaccaaatccatatacatataaatattaatcatatataattaatatcaattgggttagcaaaacaaatctagtctaggtgtgttttgcgaatgcggccgctcgagggggggcccggtaccggcgcgccgttctatagtgtcacctaaatcgtatgtgtatgatacataaggttatgtattaattgtagccgcgttctaacgacaatatgtccatatggtgcactctcagtacaatctgctctgatgccgcatagttaagccagccccgacacccgccaacacccgctgacgcgccctgacgggcttgtctgctcccggcatccgcttacagacaagctgtgaccgtctccgggagctgcatgtgtcagaggttttcaccgtcatcaccgaaacgcgcgagacgaaagggcctcgtgatacgcctatttttataggttaatgtcatgaccaaaatcccttaacgtgagttttcgttccactgagcgtcagaccccgtagaaaagatcaaaggatcttcttgagatcctttttttctgcgcgtaatctgctgcttgcaaacaaaaaaaccaccgctaccagcggtggtttgtttgccggatcaagagctaccaactctttttccgaaggtaactggcttcagcagagcgcagataccaaatactgtccttctagtgtagccgtagttaggccaccacttcaagaactctgtagcaccgcctacatacctcgctctgctaatcctgttaccagtggctgctgccagtggcgataagtcgtgtcttaccgggttggactcaagacgatagttaccggataaggcgcagcggtcgggctgaacggggggttcgtgcacacagcccagcttggagcgaacgacctacaccgaactgagatacctacagcgtgagcattgagaaagcgccacgcttcccgaagggagaaaggcggacaggtatccggtaagcggcagggtcggaacaggagagcgcacgagggagcttccagggggaaacgcctggtatctttatagtcctgtcgggtttcgccacctctgacttgagcgtcgatttttgtgatgctcgtcaggggggcggagcctatggaaaaacgccagcaacgcggcctttttacggttcctggccttttgctggccttttgctcacatgttctttcctgcgttatcccctgattctgtggataaccgtattaccgcctttgagtgagctgataccgctcgccgcagccgaacgaccgagcgcagcgagtcagtgagcgaggaagcggaagagcgcccaatacgcaaaccgcctctccccgcgcgttggccgattcattaatgcaggttgatcagatctcgatcccgcgaaattaatacgactcactatagggagaccacaacggtttccctctagaaataattttgtttaactttaagaaggagatatacccatggaaaagcctgaactcaccgcgacgtctgtcgagaagtttctgatcgaaaagttcgacagcgtctccgacctgatgcagctctcggagggcgaagaatctcgtgctttcagcttcgatgtaggagggcgtggatatgtcctgcgggtaaatagctgcgccgatggtttctacaaagatcgttatgtttatcggcactttgcatcggccgcgctcccgattccggaagtgcttgacattggggaattcagcgagagcctgacctattgcatctcccgccgtgcacagggtgtcacgttgcaagacctgcctgaaaccgaactgcccgctgttctgcagccggtcgcggaggctatggatgcgatcgctgcggccgatcttagccagacgagcgggttcggcccattcggaccgcaaggaatcggtcaatacactacatggcgtgatttcatatgcgcgattgctgatccccatgtgtatcactggcaaactgtgatggacgacaccgtcagtgcgtccgtcgcgcaggctctcgatgagctgatgctttgggccgaggactgccccgaagtccggcacctcgtgcacgcggatttcggctccaacaatgtcctgacggacaatggccgcataacagcggtcattgactggagcgaggcgatgttcggggattcccaatacgaggtcgccaacatcttcttctggaggccgtggttggcttgtatggagcagcagacgcgctacttcgagcggaggcatccggagcttgcaggatcgccgcggctccgggcgtatatgctccgcattggtcttgaccaactctatcagagcttggttgacggcaatttcgatgatgcagcttgggcgcagggtcgatgcgacgcaatcgtccgatccggagccgggactgtcgggcgtacacaaatcgcccgcagaagcgcggccgtctggaccgatggctgtgtagaagtactcgccgatagtggaaaccgacgccccagcactcgtccgagggcaaaggaatagtgaggtacagcttggatcgatccggctgctaacaaagcccgaaaggaagctgagttggctgctgccaccgctgagcaataactagcataaccccttggggcctctaaacgggtcttgaggggttttttgctgaaaggaggaactatatccggatgatcgggcgcgccggtac

SEQ ID NO: 120 - DNA, 434 bp, Glycine max
ccgggtgtgatttagtataaagtgaagtaatggtcaaaagaaaaagtgtaaaacgaagtacctagtaataagtaatattgaacaaaataaatggtaaagtgtcagatatataaaataggctttaataaaaggaagaaaaaaaacaaacaaaaaataggttgcaatggggcagagcagagtcatcatgaagctagaaaggctaccgatagataaactatagttaattaaatacattaaaaaatacttggatctttctcttaccctgtttatattgagacctgaaacttgagagagatacactaatcttgccttgttgtttcattccctaacttacaggactcagcgcatgtcatgtggtctcgttccccatttaagtcccacaccgtctaaacttattaaattattaatgtttataactagatgcacaacaacaa

SEQ ID NO: 121 - DNA, 104 bp, Artificial sequence
  Guide RNA for DD43CR1
gtcccttgtacttgtacgtagttttagagctagaaatagcaagttaaaataaggctagtccgttatcaacttgaaaaagtggcaccgagtcggtgctttttttt

SEQ ID NO: 122 - DNA, 3098 bp, Artificial sequence
  QC783
ccgggtgtgatttagtataaagtgaagtaatggtcaaaagaaaaagtgtaaaacgaagtacctagtaataagtaatattgaacaaaataaatggtaaagtgtcagatatataaaataggctttaataaaaggaagaaaaaaaacaaacaaaaaataggttgcaatggggcagagcagagtcatcatgaagctagaaaggctaccgatagataaactatagttaattaaatacattaaaaaatacttggatctttctcttaccctgtttatattgagacctgaaacttgagagagatacactaatcttgccttgttgtttcattccctaacttacaggactcagcgcatgtcatgtggtctcgttccccatttaagtcccacaccgtctaaacttattaaattattaatgtttataactagatgcacaacaacaaagcttgtcccttgtacttgtacgtagttttagagctagaaatagcaagttaaaataaggctagtccgttatcaacttgaaaaagtggcaccgagtcggtgcttttttttgcggccgctcgagggggggcccggtaccggcgcgccgttctatagtgtcacctaaatcgtatgtgtatgatacataaggttatgtattaattgtagccgcgttctaacgacaatatgtccatatggtgcactctcagtacaatctgctctgatgccgcatagttaagccagccccgacacccgccaacacccgctgacgcgccctgacgggcttgtctgctcccggcatccgcttacagacaagctgtgaccgtctccgggagctgcatgtgtcagaggttttcaccgtcatcaccgaaacgcgcgagacgaaagggcctcgtgatacgcctatttttataggttaatgtcatgaccaaaatcccttaacgtgagttttcgttccactgagcgtcagaccccgtagaaaagatcaaaggatcttcttgagatcctttttttctgcgcgtaatctgctgcttgcaaacaaaaaaaccaccgctaccagcggtggtttgtttgccggatcaagagctaccaactctttttccgaaggtaactggcttcagcagagcgcagataccaaatactgtccttctagtgtagccgtagttaggccaccacttcaagaactctgtagcaccgcctacatacctcgctctgctaatcctgttaccagtggctgctgccagtggcgataagtcgtgtcttaccgggttggactcaagacgatagttaccggataaggcgcagcggtcgggctgaacggggggttcgtgcacacagcccagcttggagcgaacgacctacaccgaactgagatacctacagcgtgagcattgagaaagcgccacgcttcccgaagggagaaaggcggacaggtatccggtaagcggcagggtcggaacaggagagcgcacgagggagcttccagggggaaacgcctggtatctttatagtcctgtcgggtttcgccacctctgacttgagcgtcgatttttgtgatgctcgtcaggggggcggagcctatggaaaaacgccagcaacgcggcctttttacggttcctggccttttgctggccttttgctcacatgttctttcctgcgttatcccctgattctgtggataaccgtattaccgcctttgagtgagctgataccgctcgccgcagccgaacgaccgagcgcagcgagtcagtgagcgaggaagcggaagagcgcccaatacgcaaaccgcctctccccgcgcgttggccgattcattaatgcaggttgatcagatctcgatcccgcgaaattaatacgactcactatagggagaccacaacggtttccctctagaaataattttgtttaactttaagaaggagatatacccatggaaaagcctgaactcaccgcgacgtctgtcgagaagtttctgatcgaaaagttcgacagcgtctccgacctgatgcagctctcggagggcgaagaatctcgtgctttcagcttcgatgtaggagggcgtggatatgtcctgcgggtaaatagctgcgccgatggtttctacaaagatcgttatgtttatcggcactttgcatcggccgcgctcccgattccggaagtgcttgacattggggaattcagcgagagcctgacctattgcatctcccgccgtgcacagggtgtcacgttgcaagacctgcctgaaaccgaactgcccgctgttctgcagccggtcgcggaggctatggatgcgatcgctgcggccgatcttagccagacgagcgggttcggcccattcggaccgcaaggaatcggtcaatacactacatggcgtgatttcatatgcgcgattgctgatccccatgtgtatcactggcaaactgtgatggacgacaccgtcagtgcgtccgtcgcgcaggctctcgatgagctgatgctttgggccgaggactgccccgaagtccggcacctcgtgcacgcggatttcggctccaacaatgtcctgacggacaatggccgcataacagcggtcattgactggagcgaggcgatgttcggggattcccaatacgaggtcgccaacatcttcttctggaggccgtggttggcttgtatggagcagcagacgcgctacttcgagcggaggcatccggagcttgcaggatcgccgcggctccgggcgtatatgctccgcattggtcttgaccaactctatcagagcttggttgacggcaatttcgatgatgcagcttgggcgcagggtcgatgcgacgcaatcgtccgatccggagccgggactgtcgggcgtacacaaatcgcccgcagaagcgcggccgtctggaccgatggctgtgtagaagtactcgccgatagtggaaaccgacgccccagcactcgtccgagggcaaaggaatagtgaggtacagcttggatcgatccggctgctaacaaagcccgaaaggaagctgagttggctgctgccaccgctgagcaataactagcataaccccttggggcctctaaacgggtcttgaggggttttttgctgaaaggaggaactatatccggatgatcgggcgcgccggtac

SEQ ID NO: 123 - DNA, 9093 bp, Artificial sequence
  QC815
ccgggtgtgatttagtataaagtgaagtaatggtcaaaagaaaaagtgtaaaacgaagtacctagtaataagtaatattgaacaaaataaatggtaaagtgtcagatatataaaataggctttaataaaaggaagaaaaaaaacaaacaaaaaataggttgcaatggggcagagcagagtcatcatgaagctagaaaggctaccgatagataaactatagttaattaaatacattaaaaaatacttggatctttctcttaccctgtttatattgagacctgaaacttgagagagatacactaatcttgccttgttgtttcattccctaacttacaggactcagcgcatgtcatgtggtctcgttccccatttaagtcccacaccgtctaaacttattaaattattaatgtttataactagatgcacaacaacaaagcttgtcccttgtacttgtacgtagttttagagctagaaatagcaagttaaaataaggctagtccgttatcaacttgaaaaagtggcaccgagtcggtgcttttttttgcggccgcaattggatcgggtttacttattttgtgggtatctatacttttattagatttttaatcaggctcctgatttctttttatttcgattgaattcctgaacttgtattattcagtagatcgaataaattataaaaagataaaatcataaaataatattttatcctatcaatcatattaaagcaatgaatatgtaaaattaatcttatctttattttaaaaaatcatataggtttagtatttttttaaaaataaagataggattagttttactattcactgcttattacttttaaaaaaatcataaaggtttagtatttttttaaaataaatataggaatagttttactattcactgctttaatagaaaaatagtttaaaatttaagatagttttaatcccagcatttgccacgtttgaacgtgagccgaaacgatgtcgttacattatcttaacctagctgaaacgatgtcgtcataatatcgccaaatgccaactggactacgtcgaacccacaaatcccacaaagcgcgtgaaatcaaatcgctcaaaccacaaaaaagaacaacgcgtttgttacacgctcaatcccacgcgagtagagcacagtaaccttcaaataagcgaatggggcataatcagaaatccgaaataaacctaggggcattatcggaaatgaaaagtagctcactcaatataaaaatctaggaaccctagttttcgttatcactctgtgctccctcgctctatttctcagtctctgtgtttgcggctgaggattccgaacgagtgaccttcttcgtttctcgcaaaggtaacagcctctgctcttgtctcttcgattcgatctatgcctgtctcttatttacgatgatgtttcttcggttatgtttttttatttatgctttatgctgttgatgttcggttgtttgtttcgctttgtttttgtggttcagttttttaggattcttttggtttttgaatcgattaatcggaagagattttcgagttatttggtgtgttggaggtgaatcttttttttgaggtcatagatctgttgtatttgtgttataaacatgcgactttgtatgattttttacgaggttatgatgttctggttgttttattatgaatctgttgagacagaaccatgatttttgttgatgttcgtttacactattaaaggtttgttttaacaggattaaaagttttttaagcatgttgaaggagtcttgtagatatgtaaccgtcgatagtttttttgtgggtttgttcacatgttatcaagcttaatcttttactatgtatgcgaccatatctggatccagcaaaggcgattttttaattccttgtgaaacttttgtaatatgaagttgaaattttgttattggtaaactataaatgtgtgaagttggagtatacctttaccttcttatttggctttgtgatagtttaatttatatgtattttgagttctgacttgtatttctttgaattgattctagtttaagtaatccatggacaaaaagtactcaatagggctcgacatagggactaactccgttggatgggccgtcatcaccgacgagtacaaggtgccctccaagaagttcaaggtgttgggaaacaccgacaggcacagcataaagaagaatttgatcggtgccctcctcttcgactccggagagaccgctgaggctaccaggctcaagaggaccgctagaaggcgctacaccagaaggaagaacagaatctgctacctgcaggagatcttctccaacgagatggccaaggtggacgactccttcttccaccgccttgaggaatcattcctggtggaggaggataaaaagcacgagagacacccaatcttcgggaacatcgtcgacgaggtggcctaccatgaaaagtaccctaccatctaccacctgaggaagaagctggtcgactctaccgacaaggctgacttgcgcttgatttacctggctctcgctcacatgataaagttccgcggacacttcctcattgagggagacctgaacccagacaactccgacgtggacaagctcttcatccagctcgttcagacctacaaccagcttttcgaggagaacccaatcaacgccagtggagttgacgccaaggctatcctctctgctcgtctgtcaaagtccaggaggcttgagaacttgattgcccagctgcctggcgaaaagaagaacggactgttcggaaacttgatcgctctctccctgggattgactcccaacttcaagtccaacttcgacctcgccgaggacgctaagttgcagttgtctaaagacacctacgacgatgacctcgacaacttgctggcccagataggcgaccaatacgccgatctcttcctcgccgctaagaacttgtccgacgcaatcctgctgtccgacatcctgagagtcaacactgagattaccaaagctcctctgtctgcttccatgattaagcgctacgacgagcaccaccaagatctgaccctgctcaaggccctggtgagacagcagctgcccgagaagtacaaggagatctttttcgaccagtccaagaacggctacgccggatacattgacggaggcgcctcccaggaagagttctacaagttcatcaagcccatccttgagaagatggacggtaccgaggagctgttggtgaagttgaacagagaggacctgttgaggaagcagagaaccttcgacaacggaagcatccctcaccaaatccacctgggagagctccacgccatcttgaggaggcaggaggatttctatcccttcctgaaggacaaccgcgagaagattgagaagatcttgaccttcagaattccttactacgtcgggccactcgccagaggaaactctaggttcgcctggatgacccgcaaatctgaagagaccattactccctggaacttcgaggaagtcgtggacaagggcgcttccgctcagtctttcatcgagaggatgaccaacttcgataaaaatctgcccaacgagaaggtgctgcccaagcactccctgttgtacgagtatttcacagtgtacaacgagctcaccaaggtgaagtacgtcacagagggaatgaggaagcctgccttcttgtccggagagcagaagaaggccatcgtcgacctgctcttcaagaccaacaggaaggtgactgtcaagcagctgaaggaggactacttcaagaagatcgagtgcttcgactccgtcgagatctctggtgtcgaggacaggttcaacgcctcccttgggacttaccacgatctgctcaagattattaaagacaaggacttcctggacaacgaggagaacgaggacatccttgaggacatcgtgctcaccctgaccttgttcgaagacagggaaatgatcgaagagaggctcaagacctacgcccacctcttcgacgacaaggtgatgaaacagctgaagagacgcagatataccggctggggaaggctctcccgcaaattgatcaacgggatcagggacaagcagtcagggaagactatactcgacttcctgaagtccgacggattcgccaacaggaacttcatgcagctcattcacgacgactccttgaccttcaaggaggacatccagaaggctcaggtgtctggacagggtgactccttgcatgagcacattgctaacttggccggctctcccgctattaagaagggcattttgcagaccgtgaaggtcgttgacgagctcgtgaaggtgatgggacgccacaagccagagaacatcgttattgagatggctcgcgagaaccaaactacccagaaagggcagaagaattcccgcgagaggatgaagcgcattgaggagggcataaaagagcttggctctcagatcctcaaggagcaccccgtcgagaacactcagctgcagaacgagaagctgtacctgtactacctccaaaacggaagggacatgtacgtggaccaggagctggacatcaacaggttgtccgactacgacgtcgaccacatcgtgcctcagtccttcctgaaggatgactccatcgacaataaagtgctgacacgctccgataaaaatagaggcaagtccgacaacgtcccctccgaggaggtcgtgaagaagatgaaaaactactggagacagctcttgaacgccaagctcatcacccagcgtaagttcgacaacctgactaaggctgagagaggaggattgtccgagctcgataaggccggattcatcaagagacagctcgtcgaaacccgccaaattaccaagcacgtggcccaaattctggattcccgcatgaacaccaagtacgatgaaaatgacaagctgatccgcgaggtcaaggtgatcaccttgaagtccaagctggtctccgacttccgcaaggacttccagttctacaaggtgagggagatcaacaactaccaccacgcacacgacgcctacctcaacgctgtcgttggaaccgccctcatcaaaaaatatcctaagctggagtctgagttcgtctacggcgactacaaggtgtacgacgtgaggaagatgatcgctaagtctgagcaggagatcggcaaggccaccgccaagtacttcttctactccaacatcatgaacttcttcaagaccgagatcactctcgccaacggtgagatcaggaagcgcccactgatcgagaccaacggtgagactggagagatcgtgtgggacaaagggagggatttcgctactgtgaggaaggtgctctccatgcctcaggtgaacatcgtcaagaagaccgaagttcagaccggaggattctccaaggagtccatcctccccaagagaaactccgacaagctgatcgctagaaagaaagactgggaccctaagaagtacggaggcttcgattctcctaccgtggcctactctgtgctggtcgtggccaaggtggagaagggcaagtccaagaagctgaaatccgtcaaggagctcctcgggattaccatcatggagaggagttccttcgagaagaaccctatcgacttcctggaggccaagggatataaagaggtgaagaaggacctcatcatcaagctgcccaagtactccctcttcgagttggagaacggaaggaagaggatgctggcttctgccggagagttgcagaagggaaatgagctcgcccttccctccaagtacgtgaacttcctgtacctcgcctctcactatgaaaagttgaagggctctcctgaggacaacgagcagaagcagctcttcgtggagcagcacaagcactacctggacgaaattatcgagcagatctctgagttctccaagcgcgtgatattggccgacgccaacctcgacaaggtgctgtccgcctacaacaagcacagggataagcccattcgcgagcaggctgaaaacattatccacctgtttaccctcacaaacttgggagcccctgctgccttcaagtacttcgacaccaccattgacaggaagagatacacctccaccaaggaggtgctcgacgcaacactcatccaccaatccatcaccggcctctatgaaacaaggattgacttgtcccagctgggaggcgactctagagccgatcccaagaagaagagaaaggtgtaggttaacctagacttgtccatcttctggattggccaacttaattaatgtatgaaataaaaggatgcacacatagtgacatgctaatcactataatgtgggcatcaaagttgtgtgttatgtgtaattactagttatctgaataaaagagaaagagatcatccatatttcttatcctaaatgaatgtcacgtgtctttataattctttgatgaaccagatgcatttcattaaccaaatccatatacatataaatattaatcatatataattaatatcaattgggttagcaaaacaaatctagtctaggtgtgttttgcgaattcgatatcaagcttatcgataccgtcgagggggggcccggtaccggcgcgccgttctatagtgtcacctaaatcgtatgtgtatgatacataaggttatgtattaattgtagccgcgttctaacgacaatatgtccatatggtgcactctcagtacaatctgctctgatgccgcatagttaagccagccccgacacccgccaacacccgctgacgcgccctgacgggcttgtctgctcccggcatccgcttacagacaagctgtgaccgtctccgggagctgcatgtgtcagaggttttcaccgtcatcaccgaaacgcgcgagacgaaagggcctcgtgatacgcctatttttataggttaatgtcatgaccaaaatcccttaacgtgagttttcgttccactgagcgtcagaccccgtagaaaagatcaaaggatcttcttgagatcctttttttctgcgcgtaatctgctgcttgcaaacaaaaaaaccaccgctaccagcggtggtttgtttgccggatcaagagctaccaactctttttccgaaggtaactggcttcagcagagcgcagataccaaatactgtccttctagtgtagccgtagttaggccaccacttcaagaactctgtagcaccgcctacatacctcgctctgctaatcctgttaccagtggctgctgccagtggcgataagtcgtgtcttaccgggttggactcaagacgatagttaccggataaggcgcagcggtcgggctgaacggggggttcgtgcacacagcccagcttggagcgaacgacctacaccgaactgagatacctacagcgtgagcattgagaaagcgccacgcttcccgaagggagaaaggcggacaggtatccggtaagcggcagggtcggaacaggagagcgcacgagggagcttccagggggaaacgcctggtatctttatagtcctgtcgggtttcgccacctctgacttgagcgtcgatttttgtgatgctcgtcaggggggcggagcctatggaaaaacgccagcaacgcggcctttttacggttcctggccttttgctggccttttgctcacatgttctttcctgcgttatcccctgattctgtggataaccgtattaccgcctttgagtgagctgataccgctcgccgcagccgaacgaccgagcgcagcgagtcagtgagcgaggaagcggaagagcgcccaatacgcaaaccgcctctccccgcgcgttggccgattcattaatgcaggttgatcagatctcgatcccgcgaaattaatacgactcactatagggagaccacaacggtttccctctagaaataattttgtttaactttaagaaggagatatacccatggaaaagcctgaactcaccgcgacgtctgtcgagaagtttctgatcgaaaagttcgacagcgtctccgacctgatgcagctctcggagggcgaagaatctcgtgctttcagcttcgatgtaggagggcgtggatatgtcctgcgggtaaatagctgcgccgatggtttctacaaagatcgttatgtttatcggcactttgcatcggccgcgctcccgattccggaagtgcttgacattggggaattcagcgagagcctgacctattgcatctcccgccgtgcacagggtgtcacgttgcaagacctgcctgaaaccgaactgcccgctgttctgcagccggtcgcggaggctatggatgcgatcgctgcggccgatcttagccagacgagcgggttcggcccattcggaccgcaaggaatcggtcaatacactacatggcgtgatttcatatgcgcgattgctgatccccatgtgtatcactggcaaactgtgatggacgacaccgtcagtgcgtccgtcgcgcaggctctcgatgagctgatgctttgggccgaggactgccccgaagtccggcacctcgtgcacgcggatttcggctccaacaatgtcctgacggacaatggccgcataacagcggtcattgactggagcgaggcgatgttcggggattcccaatacgaggtcgccaacatcttcttctggaggccgtggttggcttgtatggagcagcagacgcgctacttcgagcggaggcatccggagcttgcaggatcgccgcggctccgggcgtatatgctccgcattggtcttgaccaactctatcagagcttggttgacggcaatttcgatgatgcagcttgggcgcagggtcgatgcgacgcaatcgtccgatccggagccgggactgtcgggcgtacacaaatcgcccgcagaagcgcggccgtctggaccgatggctgtgtagaagtactcgccgatagtggaaaccgacgccccagcactcgtccgagggcaaaggaatagtgaggtacagcttggatcgatccggctgctaacaaagcccgaaaggaagctgagttggctgctgccaccgctgagcaataactagcataaccccttggggcctctaaacgggtcttgaggggttttttgctgaaaggaggaactatatccggatgatcgggcgcgccggtac

SEQ ID NO: 124 - DNA, 4107 bp, S. pyogenes
atggataagaaatactcaataggcttagatatcggcacaaatagcgtcggatgggcggtgatcactgatgattataaggttccgtctaaaaagctcaagggtctgggaaatacagaccgccacggtatcaaaaaaaatcttataggggctcttttatttgacagtggagagacagcggaagcgactcgtctcaaacggacagctcgtagaaggtatacacgtcggaagaatcgtatttgttatctacaggagattttttcaaatgagatggcgaaagtagatgatagtttctttcatcgacttgaagagtcttttttggtggaagaagacaagaagcatgaacgtcatcctatttttggaaatatagtagatgaagttgcttatcatgagaaatatccaactatctatcatctgcgaaaaaaattggcagattctactgataaagtggatttgcgcttaatctatttggccttagcgcatatgattaagtttcgtggtcattttttgattgagggagatttaaatcctgataatagtgatgtggacaaactatttatccagttggtacaaacctacaatcaattatttgaagaaaaccctattaacgcaagtagagtagatgctaaagcgattctttctgcacgattgagtaaatcaagacgattagaaaatctcattgctcagctccccggtgagaagaaaaatggattgtttgggaatctcattgctttgtcattgggattgacccctaattttaaatcaaattttgatttggcagaagatgctaaattacagctttcaaaagatacttacgatgatgatttagataatttattggcgcaaattggagatcaatatgctgatttgtttttggcagctaagaatttatcagatgctactttactttcagatatcctaagagtaaatagtgaaataactaaggctcccctatcagcttcaatgattaagcgctacgatgaacatcatcaagacttgactcttttaaaagctttagttcgacaacaacttccagaaaagtataaagaaatcttttttgatcaatcaaaaaacggatatgcaggttatattgatgggggagctagccaagaagaattttataaatttatcaaaccaattttagaaaaaatggatggtactgaggaattattggcgaaactaaatcgtgaagatttgctgcgcaagcaacggacctttgacaacggctctattccctatcaaattcacttgggtgagctgcatgctattttgagaagacaagaagacttttatccatttttaaaagacaatcgtgagaagattgaaaaaatcttgacttttcgaattccttattatgttggtccattggcgcgtggcaatagtcgttttgcatggatgactcggaagtctgaagaaacaattaccccatggaattttgaagaagttgtcgataaaggtgcttcagctcaatcatttattgaacgcatgacaaactttgataaaaatcttccaaatgaaaaagtactaccaaaacatagtttgctttatgagtattttacggtttataacgaattgacaaaagtcaaatatgttactgagggaatgcgaaaaccagcatttctttcaggtgaacagaagaaagccattgttgatttactcttcaaaacaaatcgaaaagtaaccgttaagcaattaaaagaagattatttcaaaaaaatagaatgttttgatagtgttgaaatttcaggagttgaagatagatttaatgcttcattaggtacctaccatgatttgctaaaaattattaaagataaagattttttggataatgaagaaaacgaagatatcttagaggatattgttttaacattgaccttatttgaagatagggagatgattgaggaaagacttaaaacatatgctcacctctttgatgataaggtgatgaaacagcttaaacgtcgccgttatactggttggggacgtttgtctcgaaaattgattaatggtattagggataagcaatctggcaaaacaatattagattttttgaaatcagatggttttgccaatcgcaattttatgcagctgatccatgatgatagtttgacatttaaagaagacattcaaaaagcacaagtgtctggacaaggcgatagtttacatgaacatattgcaaatttagctggtagccctgctattaaaaaaggtattttacagactgtaaaagttgttgatgaattggtcaaagtaatggggcggcataagccagaaaatatcgttattgaaatggcacgtgaaaatcagacaactcaaaagggccagaaaaattcgcgtgagcgtatgaaacgtattgaagaaggaataaaagaactaggaagtgatattctaaaggagtatcctgttgaaaacactcaattacaaaatgaaaagctctatctctattatctccaaaatggaagagacatgtatgtggaccaagaattagatattaatcgtttaagtgattatgatgtcgatcacattgttccacaaagtttccttaaagacgattcaatagacaataaggtcttaacgcgttctgataaaaatcgtggtaaatcggataacgttccaagtgaagaagtagtcaaaaagatgaaaaactattggagacaacttctaaacgccaagttaatcactcaacgtaagtttgataatttaacaaaagctgaacgtggaggtttgagtgaacttgataaagttggttttatcaaacgccaattggttgaaactcgccaaatcactaagcatgtggcacaaattttggatagtcgcatgaatactaaatacgatgaaaatgataaacttattcgagaggttagagtgattaccttaaaatctaaattagtttctgacttccgaaaagatttccaattctataaagtacgtgagattaacaattaccatcatgcccatgatgcgtatcttaatgccgtcgttggaactgctttgattaagaaatatccaaaacttgaatcggagtttgtctatggtgattataaagtttatgatgttcgtaaaatgattgctaagtctgagcaggaaataggcaaagcaaccgcaaaatatttcttttactctaatatcatgaacttcttcaaaacagaaattacacttgcaaatggagagattcgcaaacgccctctaatcgaaactaatggggaaactggagaaattgtctgggataaagggcgagattttgccacagtgcgcaaagtattgtccatgccccaagtcaatattgtcaagaaaacagaagtacagacaggcggattctccaaggagtcaattttaccaaaaagaaattcggacaagcttattgctcgtaaaaaagactgggatccaaaaaaatatggtggttttgatagtccaacggtagcttattcagtcctagtggttgctaaggtggaaaaagggaaatcgaagaagttaaaatccgttaaagagttactagggatcacaataatggaaagaagctcttttgaaaaagatccgattgactttttagaagctaaaggatataaggaagttagaaaagacttaatcattaaactacctaaatatagtctttttgagttagaaaacggtcgtaaacggatgctggctagtgccggagaattgcaaaaaggaaatgagctagctctgccaagcaaatatgtgaattttttatatttagctagtcattatgaaaagttgaagggtagtccagaagataacgaacaaaaacaattgtttgtggagcagcataagcattatttagatgagattattgagcaaatcagtgaattttctaagcgtgttattttagcagatgccaatttagataaagttcttagtgcatataacaaacatagagacaaaccaatacgtgaacaagcagaaaatattattcatttatttacgttgacgaatcttggagctcccgctgcttttaaatattttgatacaacaattgatcgtaaacgatatacgtctacaaaagaagttttagatgccactcttatccatcaatccatcactggtctttatgaaacacgcattgatttgagtcagctaggaggtgactga

SEQ ID NO: 125 - DNA, 20 bp, Glycine max
ggaactgacacacgacatga

SEQ ID NO: 126 - DNA, 20 bp, Glycine max
gacatgatggaacgtgacta

SEQ ID NO: 127 - DNA, 20 bp, Glycine max
gtcccttgtacttgtacgta

SEQ ID NO: 128 - DNA, 20 bp, Glycine max
gtattctagaaaagaggaat

SEQ ID NO: 129 - DNA, 70 bp, Glycine max
atcaaaattcggaactgacacacgacatgatggaacgtgactaaggtgggtttttgactttgcatgtcga

SEQ ID NO: 130 - DNA, 70 bp, Glycine max
tcgacatgcaaagtcaaaaacccaccttagtcacgttccatcatgtcgtgtgtcagttccgaattttgat

SEQ ID NO: 131 - DNA, 70 bp, Glycine max
ggcagactccaattcctcttttctagaataccctccgtacgtacaagtacaagggacttgtgagttgtaa

SEQ ID NO: 132 - DNA, 70 bp, Glycine max
ttacaactcacaagtcccttgtacttgtacgtacggagggtattctagaaaagaggaattggagtctgcc

SEQ ID NO: 133 - DNA, 71 bp, Glycine max
ctacactctttccctacacgacgctcttccgatctggaatttacagcacaagtagatcacttgtacttatc

SEQ ID NO: 134 - DNA, 59 bp, Glycine max
caagcagaagacggcatacgagctcttccgatctaaatcactctcacttcgacatgcaa

SEQ ID NO: 135 - DNA, 71 bp, Glycine max
ctacactctttccctacacgacgctcttccgatctttcctttacagcacaagtagatcacttgtacttatc

SEQ ID NO: 136 - DNA, 68 bp, Glycine max
ctacactctttccctacacgacgctcttccgatctagctgtaaatacagccttacaactcacaagtcc

SEQ ID NO: 137 - DNA, 63 bp, Artificial sequence
  Primer, DD43-A
caagcagaagacggcatacgagctcttccgatctttaatttaggactaaaagaagaggcagac

SEQ ID NO: 138 - DNA, 68 bp, Artificial sequence
  Primer, DD43-S4
ctacactctttccctacacgacgctcttccgatctctaggtaaatacagccttacaactcacaagtcc

SEQ ID NO: 139 - DNA, 68 bp, Artificial sequence
  Primer, DD43-S5
ctacactctttccctacacgacgctcttccgatctgatcgtaaatacagccttacaactcacaagtcc

SEQ ID NO: 140 - DNA, 43 bp, Artificial sequence; identical to SEQ ID NO: 53
  Primer, JKY557

SEQ ID NO: 141 - DNA, 18 bp, Artificial sequence
  primer, JKY558
caagcagaagacggcata

SEQ ID NO: 142 - DNA, 117 bp, Artificial sequence
  DD20CR1 PCR amplicon
ggaatttacagcacaagtagatcacttgtacttatcaaaattcggaactgacacacgacatgatggaacgtgactaaggtgggtttttgactttgcatgtcgaagtgagagtgattt

SEQ ID NO: 143 - DNA, 117 bp, Artificial sequence
  DD20CR2 PCR amplicon
ttcctttacagcacaagtagatcacttgtacttatcaaaattcggaactgacacacgacatgatggaacgtgactaaggtgggtttttgactttgcatgtcgaagtgagagtgattt

SEQ ID NO: 144 - DNA, 108 bp, Artificial sequence
  DD43CR1 PCR amplicon
agctgtaaatacagccttacaactcacaagtcccttgtacttgtacgtacggagggtattctagaaaagaggaattggagtctgcctcttcttttagtcctaaattaa

SEQ ID NO: 145 - DNA, 108 bp, Artificial sequence
  DD43CR2 PCR amplicon
ctaggtaaatacagccttacaactcacaagtcccttgtacttgtacgtacggagggtattctagaaaagaggaattggagtctgcctcttcttttagtcctaaattaa

SEQ ID NO: 146 - DNA, 108 bp, artificial sequence; identical to SEQ ID NO: 145
  amplicon

SEQ ID NO: 147 - DNA, 101 bp, Artificial sequence
  DD20CR1 mutant target site
ggaatttacagcacaagtagatcacttgtacttatcaaaattcggaactgacacacgatgatggaacgtgactaaggtgggtttttgactttgcatgtcga

SEQ ID NO: 148 - DNA, 101 bp, Artificial sequence
  DD20CR1 mutant target site
ggaatttacagcacaagtagatcacttgtacttatcaaaattcggaactgacacacgatggaacgtgactaaggtgggtttttgactttgcatgtcgaagt

SEQ ID NO: 149 - DNA, 101 bp, Artificial sequence
  DD20CR1 mutant target site
ggaatttacagcacaagtagatcacttgtacttatcaaaattcggaactgacacacgactgatggaacgtgactaaggtgggtttttgactttgcatgtcg

SEQ ID NO: 150 - DNA, 101 bp, Artificial sequence
  DD20CR1 mutant target site
ggaatttacagcacaagtagatcacttgtacttatcaaaattcggaactgacacacatggaacgtgactaaggtgggtttttgactttgcatgtcgaagtg

SEQ ID NO: 151 - DNA, 101 bp, Artificial sequence
  DD20CR1 mutant target site
ggaatttacagcacaagtagatcacttgtacttatcaaaattcggaactgacacatgatggaacgtgactaaggtgggtttttgactttgcatgtcgaagt

SEQ ID NO: 152 - DNA, 101 bp, Artificial sequence
  DD20CR1 mutant target site
ggaatttacagcacaagtagatcacttgtacttatcaaaattcggaactgacacagacatgatggaacgtgactaaggtgggtttttgactttgcatgtcg

SEQ ID NO: 153 - DNA, 101 bp, Artificial sequence
  DD20CR1 mutant target site
ggaatttacagcacaagtagatcacttgtacttatcaaaattcggaactgacacgacatgatggaacgtgactaaggtgggtttttgactttgcatgtcga

SEQ ID NO: 154 - DNA, 101 bp, Artificial sequence
  DD20CR1 mutant target site i
ggaatttacagcacaagtagatcacttgtacttatcaaaattcggaactgacacaagaaatgatggaacgtgactaaggtgggtttttgactttgcatgtc

SEQ ID NO: 155 - DNA, 101 bp, Artificial sequence
  DD20CR1 mutant target site
ggaatttacagcacaagtagatcacttgtacttatcaaaattcggaactgacacacgattgaacgtgactaaggtgggtttttgactttgcatgtcgaagt

SEQ ID NO: 156 - DNA, 101 bp, Artificial sequence
  DD20CR1 mutant target site
ggaatttacagcacaagtagatcacttgtacttatcaaaattcggaactgacacacattgaacgtgactaaggtgggtttttgactttgcatgtcgaagtg

SEQ ID NO: 157 - DNA, 101 bp, Artificial sequence
  DD20CR2 mutant target site
ttcctttacagcacaagtagatcacttgtacttatcaaaattcggaactgacacacgacatgatggaacgtctaaggtgggtttttgactttgcatgtcga

SEQ ID NO: 158 - DNA, 101 bp, Artificial sequence
  DD20CR2 mutant target site
ttcctttacagcacaagtagatcacttgtacttatcaaaattcggaactgacacacgacatgatggaacctaaggtgggtttttgactttgcatgtcgaag

SEQ ID NO: 159 - DNA, 101 bp, Artificial sequence
  DD20CR2 mutant target site
ttcctttacagcacaagtagatcacttgtacttatcaaaattcggaactgacacacgacatgatggaacgtgactaggtgggtttttgactttgcatgtcg

SEQ ID NO: 160 - DNA, 101 bp, Artificial sequence
  DD20CR2 mutant target site
ttcctttacagcacaagtagatcacttgtacttatcaaaattcggaactgacacacgacatgatggaactaaggtgggtttttgactttgcatgtcgaagt

SEQ ID NO: 161 - DNA, 101 bp, Artificial sequence
  DD20CR2 mutant target site
ttcctttacagcacaagtagatcacttgtacttatcaaaattcggaactgacacacgacatgatggaacgaaggtgggtttttgactttgcatgtcgaagt

SEQ ID NO: 162 - DNA, 101 bp, Artificial sequence
  DD20CR2 mutant target site
ttcctttacagcacaagtagatcacttgtacttatcaaaattcggaactgacacacgacatgatggaaggtgggtttttgactttgcatgtcgaagtgaga

SEQ ID NO: 163 - DNA, 101 bp, Artificial sequence
  DD20CR2 mutant target site i
ttcctttacagcacaagtagatcacttgtacttatcaaaattcggaactgacacacgacatgatggacgtgactaaggtgggtttttgactttgcatgtcg

SEQ ID NO: 164 - DNA, 101 bp, Artificial sequence
  DD20CR2 mutant target site
ttcctttacagcacaagtagatcacttgtacttatcaaaattcggaactgacacacgacatgatggaactttactaaggtgggtttttgactttgcatgtc

SEQ ID NO: 165 - DNA, 101 bp, Artificial sequence
  DD20CR2 mutant target site
ttcctttacagcacaagtagatcacttgtacttatcaaaattcggaactgacacacgacatgatggaacgtgacaaggtgggtttttgactttgcatgtcg

SEQ ID NO: 166 - DNA, 101 bp, Artificial sequence
  DD20CR2 mutant target site
ttcctttacagcacaagtagatcacttgtacttatcaaaattcggaactgacacactacattatttaactttactaaggtgggtttttgactttgcatgtc

SEQ ID NO: 167 - DNA, 108 bp, Artificial sequence; identical to SEQ ID NO: 144
  DD43CR1 mutant target site

SEQ ID NO: 168 - DNA, 101 bp, Artificial sequence
  DD43CR1 mutant target site
agctgtaaatacagccttacaactcacaagtcccttgtacggagggtattctagaaaagaggaattggagtctgcctcttcttttagtcctaaattaaaga

SEQ ID NO: 169 - DNA, 101 bp, Artificial sequence
  DD43CR1 mutant target site
agctgtaaatacagccttacaactcacaagtcccttgtacttgtacggagggtattctagaaaagaggaattggagtctgcctcttcttttagtcctaaat

SEQ ID NO: 170 - DNA, 101 bp, Artificial sequence
  DD43CR1 mutant target site
agctgtaaatacagccttacaactcacaagtcccttacggagggtattctagaaaagaggaattggagtctgcctcttcttttagtcctaaattaaagatc

SEQ ID NO: 171 - DNA, 101 bp, Artificial sequence
  DD43CR1 mutant target site
agctgtaaatacagccttacaactcacaagtcccttgtacttgtaccgtacggagggtattctagaaaagaggaattggagtctgcctcttcttttagtcc

SEQ ID NO: 172 - DNA, 101 bp, Artificial sequence
  DD43CR1 mutant target site
agctgtaaatacagccttacaactcacaagtcccttgtactgtacggagggtattctagaaaagaggaattggagtctgcctcttcttttagtcctaaatt

SEQ ID NO: 173 - DNA, 101 bp, Artificial sequence
  DD43CR1 mutant target site
agctgtaaatacagccttacaactcacaagtcccttgtagtacggagggtattctagaaaagaggaattggagtctgcctcttcttttagtcctaaattaa

SEQ ID NO: 174 - DNA, 101 bp, Artificial sequence
  DD43CR1 mutant target site
agctgtaaatacagccttacaactcacaagtcccttgtacttgtacgtagggtattctagaaaagaggaattggagtctgcctcttcttttagtcctaaat

SEQ ID NO: 175 - DNA, 100 bp, Artificial sequence
  DD43CR1 mutant target site
agctgtaaatacagccttacaactcacaagtcctacactctttccctacacgacgctcttcttttagtcctaaattaaagatcggaagatctcgtatgcc

SEQ ID NO: 176 - DNA, 101 bp, Artificial sequence
  DD43CR1 mutant target site
agctgtaaatacagccttacaactcacaagtcccttgtacttgtaccttacggagggtattctagaaaagaggaattggagtctgcctcttcttttagtcc

SEQ ID NO: 177 - DNA, 101 bp, Artificial sequence
  DD43CR2 mutant target site
ctaggtaaatacagccttacaactcacaagtcccttgtacttgtacgtacggagggtattctagaaaattggagtctgcctcttcttttagtcctaaatta

SEQ ID NO: 178 - DNA, 101 bp, Artificial sequence
  DD43CR2 mutant target site
ctaggtaaatacagccttacaactcacaagtcccttgtacttgtacgtacggagggtattctagaaaagaattggagtctgcctcttcttttagtcctaaa

SEQ ID NO: 179 - DNA, 101 bp, Artificial sequence
  DD43CR2 mutant target site
ctaggtaaatacagccttacaactcacaagtcccttgtacttgtacgtacggagggtattctagaattggagtctgcctcttcttttagtcctaaattaaa

SEQ ID NO: 180 - DNA, 101 bp, Artificial sequence
  DD43CR2 mutant target site
ctaggtaaatacagccttacaactcacaagtcccttgtacttgtacgtacggagggtattctagaaaagaaattggagtctgcctcttcttttagtcctaa

SEQ ID NO: 181 - DNA, 101 bp, Artificial sequence
  DD43CR2 mutant target site
ctaggtaaatacagccttacaactcacaagtcccttgtacttgtacgtacggagggtattctagaaaaattggagtctgcctcttcttttagtcctaaatt

SEQ ID NO: 182 - DNA, 101 bp, Artificial sequence
  DD43CR2 mutant target site
ctaggtaaatacagccttacaactcacaagtcccttgtacttgtacgtacggagggtattctagaaaagaggattggagtctgcctcttcttttagtccta

SEQ ID NO: 183 - DNA, 101 bp, Artificial sequence
  DD43CR2 mutant target site
ctaggtaaatacagccttacaactcacaagtcccttgtacttgtacgtacggagggtattctagaaattggagtctgcctcttcttttagtcctaaattaa

SEQ ID NO: 184 - DNA, 101 bp, Artificial sequence
  DD43CR2 mutant target site
ctaggtaaatacagccttacaactcacaagtcccttgtacttgtacgtacggagggtattctattggagtctgcctcttcttttagtcctaaattaaagat

SEQ ID NO: 185 - DNA, 101 bp, Artificial sequence
  DD43CR2 mutant target site
ctaggtaaatacagccttacaactcacaagtcccttgtacttgtacgtacggagggtattctagtctgcctcttcttttagtcctaaattaaagatcggaa

SEQ ID NO: 186 - DNA, 101 bp, Artificial sequence
  DD43CR2 mutant target site
ctaggtaaatacagccttacaactcacaagtcccttgtacttgtacgtacggagggtattctagaaaagtctgcctcttcttttagtcctaaattaaagat

SEQ ID NO: 187 - DNA, 101 bp, Artificial sequence
  DD43CR2 mutant target site
ctaggtaaatacagccttacaactcacaagtcccttgtacttgtacgtacggagggtattctagaaaagagaattggagtctgcctcttcttttagtccta

SEQ ID NO: 188 - DNA, 101 bp, Artificial sequence
  DD43CR2 mutant target site
ctaggtaaatacagccttacaactcacaagtcccttgtacttgtacgtacggagggtattctagaaaagaggagtctgcctcttcttttagtcctaaatta

SEQ ID NO: 189 - DNA, 101 bp, Artificial sequence
  DD43CR2 mutant target site
ctaggtaaatacagccttacaactcacaagtcccttgtacttgtacgtacggagggtattctaattggagtctgcctcttcttttagtcctaaattaaaga

SEQ ID NO: 190 - DNA, 101 bp, Artificial sequence
  DD43CR2 mutant target site
ctaggtaaatacagccttacaactcacaagtcccttgtacttgtacgtacggagggtattctagaaaagaggaaattggagtctgcctcttcttttagtcc

SEQ ID NO: 191 - DNA, 101 bp, Artificial sequence
  DD43CR2 mutant target site
ctaggtaaatacagccttacaactcacaagtcccttgtacttgtacgtacggagggtattctagaaagaggaattggagtctgcctcttcttttagtccta

SEQ ID NO: 192 - protein, 1377 aa, Artificial sequence
  maize optimized moCAS9 endonuclease
MAPKKKRKVMDKKYSIGLDIGTNSVGWAVITDEYKVPSKKFKVLGNTDRHSIKKNLIGALLFDSGETAEATRLKRTARRRYTRRKNRICYLQEIFSNEMAKVDDSFFHRLEESFLVEEDKKHERHPIFGNIVDEVAYHEKYPTIYHLRKKLVDSTDKADLRLIYLALAHMIKFRGHFLIEGDLNPDNSDVDKLFIQLVQTYNQLFEENPINASGVDAKAILSARLSKSRRLENLIAQLPGEKKNGLFGNLIALSLGLTPNFKSNFDLAEDAKLQLSKDTYDDDLDNLLAQIGDQYADLFLAAKNLSDAILLSDILRVNTEITKAPLSASMIKRYDEHHQDLTLLKALVRQQLPEKYKEIFFDQSKNGYAGYIDGGASQEEFYKFIKPILEKMDGTEELLVKLNREDLLRKQRTFDNGSIPHQIHLGELHAILRRQEDFYPFLKDNREKIEKILTFRIPYYVGPLARGNSRFAWMTRKSEETITPWNFEEVVDKGASAQSFIERMTNFDKNLPNEKVLPKHSLLYEYFTVYNELTKVKYVTEGMRKPAFLSGEQKKAIVDLLFKTNRKVTVKQLKEDYFKKIECFDSVEISGVEDRFNASLGTYHDLLKIIKDKDFLDNEENEDILEDIVLTLTLFEDREMIEERLKTYAHLFDDKVMKQLKRRRYTGWGRLSRKLINGIRDKQSGKTILDFLKSDGFANRNFMQLIHDDSLTFKEDIQKAQVSGQGDSLHEHIANLAGSPAIKKGILQTVKVVDELVKVMGRHKPENIVIEMARENQTTQKGQKNSRERMKRIEEGIKELGSQILKEHPVENTQLQNEKLYLYYLQNGRDMYVDQELDINRLSDYDVDHIVPQSFLKDDSIDNKVLTRSDKNRGKSDNVPSEEVVKKMKNYWRQLLNAKLITQRKFDNLTKAERGGLSELDKAGFIKRQLVETRQITKHVAQILDSRMNTKYDENDKLIREVKVITLKSKLVSDFRKDFQFYKVREINNYHHAHDAYLNAVVGTALIKKYPKLESEFVYGDYKVYDVRKMIAKSEQEIGKATAKYFFYSNIMNFFKTEITLANGEIRKRPLIETNGETGEIVWDKGRDFATVRKVLSMPQVNIVKKTEVQTGGFSKESILPKRNSDKLIARKKDWDPKKYGGFDSPTVAYSVLVVAKVEKGKSKKLKSVKELLGITIMERSSFEKNPIDFLEAKGYKEVKKDLIIKLPKYSLFELENGRKRMLASAGELQKGNELALPSKYVNFLYLASHYEKLKGSPEDNEQKQLFVEQHKHYLDEIIEQISEFSKRVILADANLDKVLSAYNKHRDKPIREQAENIIHLFTLTNLGAPAAFKYFDTTIDRKRYTSTKEVLDATLIHQSITGLYETRIDLSQLGGD

SEQ ID NO: 193 - DNA, 6677 bp, Artificial sequence
  maize optimized moCAS9 endonuclease
ctgcagtgcagcgtgacccggtcgtgcccctctctagagataatgagcattgcatgtctaagttataaaaaattaccacatattttttttgtcacacttgtttgaagtgcagtttatctatctttatacatatatttaaactttactctacgaataatataatctatagtactacaataatatcagtgttttagagaatcatataaatgaacagttagacatggtctaaaggacaattgagtattttgacaacaggactctacagttttatctttttagtgtgcatgtgttctcctttttttttgcaaatagcttcacctatataatacttcatccattttattagtacatccatttagggtttagggttaatggtttttatagactaatttttttagtacatctattttattctattttagcctctaaattaagaaaactaaaactctattttagtttttttatttaataatttagatataaaatagaataaaataaagtgactaaaaattaaacaaataccctttaagaaattaaaaaaactaaggaaacatttttcttgtttcgagtagataatgccagcctgttaaacgccgtcgacgagtctaacggacaccaaccagcgaaccagcagcgtcgcgtcgggccaagcgaagcagacggcacggcatctctgtcgctgcctctggacccctctcgagagttccgctccaccgttggacttgctccgctgtcggcatccagaaattgcgtggcggagcggcagacgtgagccggcacggcaggcggcctcctcctcctctcacggcacggcagctacgggggattcctttcccaccgctccttcgctttcccttcctcgcccgccgtaataaatagacaccccctccacaccctctttccccaacctcgtgttgttcggagcgcacacacacacaaccagatctcccccaaatccacccgtcggcacctccgcttcaaggtacgccgctcgtcctcccccccccccctctctaccttctctagatcggcgttccggtccatgcatggttagggcccggtagttctacttctgttcatgtttgtgttagatccgtgtttgtgttagatccgtgctgctagcgttcgtacacggatgcgacctgtacgtcagacacgttctgattgctaacttgccagtgtttctctttggggaatcctgggatggctctagccgttccgcagacgggatcgatttcatgattttttttgtttcgttgcatagggtttggtttgcccttttcctttatttcaatatatgccgtgcacttgtttgtcgggtcatcttttcatgcttttttttgtcttggttgtgatgatgtggtctggttgggcggtcgttctagatcggagtagaattctgtttcaaactacctggtggatttattaattttggatctgtatgtgtgtgccatacatattcatagttacgaattgaagatgatggatggaaatatcgatctaggataggtatacatgttgatgcgggttttactgatgcatatacagagatgctttttgttcgcttggttgtgatgatgtggtgtggttgggcggtcgttcattcgttctagatcggagtagaatactgtttcaaactacctggtgtatttattaattttggaactgtatgtgtgtgtcatacatcttcatagttacgagtttaagatggatggaaatatcgatctaggataggtatacatgttgatgtgggttttactgatgcatatacatgatggcatatgcagcatctattcatatgctctaaccttgagtacctatctattataataaacaagtatgttttataattattttgatcttgatatacttggatgatggcatatgcagcagctatatgtggatttttttagccctgccttcatacgctatttatttgcttggtactgtttcttttgtcgatgctcaccctgttgtttggtgttacttctgcaggtcgactctagaggatccccatggccccgaagaagaagaggaaggtgcacatggataagaagtacagcatcggcctcgacatcgggaccaacagcgtcggctgggccgtcatcaccgacgaatataaggtgcccagcaagaagttcaaggtgctcgggaatacagaccgccacagcatcaagaagaacctgatcggcgccctcctgttcgactcgggcgagaccgctgaggccaccagactaaagaggaccgctcgccgccgctacacccgccgcaagaaccgcatatgctacctccaggagatcttcagcaacgagatggccaaggtggacgacagcttcttccaccgccttgaggagtcgttcctcgtggaggaggacaagaagcatgagaggcacccgatcttcgggaacatcgtggacgaggtaagtttctgcttctacctttgatatatatataataattatcattaattagtagtaatataatatttcaaatatttttttcaaaataaaagaatgtagtatatagcaattgcttttctgtagtttataagtgtgtatattttaatttataacttttctaatatatgaccaaaacatggtgatgtgcaggtggcgtaccacgagaagtacccgacgatctaccacctccgcaagaagctggtcgactccacagacaaggccgacctcagactgatctacctggccctcgcgcacatgatcaagttccgcgggcacttcctcatcgagggcgacctgaacccggacaactccgacgtcgacaagctcttcatccagctggtccagacctacaatcaactgttcgaggagaacccgatcaacgcgtccggcgtggacgcgaaggccatcctcagcgcgaggctcagcaaatcaagacggctggagaacctgatcgcccagctcccaggcgagaagaaaaacggcttgttcggcaacctgatcgcgctctcgctcggcctcacgcccaacttcaaatcaaacttcgacctggccgaggacgcgaaactgcagctgtccaaggacacttacgacgacgacctcgacaacctgctggcgcaaatcggtgaccagtacgcagacctcttcctggccgccaagaacctctcggacgccatcctgctgtccgatatcctgagagtgaatacggagatcaccaaggcgccgctcagcgcctccatgattaaaaggtacgacgagcaccaccaggacctgacgctgctcaaggccctggtgcgccagcagctccccgagaagtacaaggagatcttcttcgaccaatcaaaaaacggctacgccggctacatcgacgggggcgcctcccaggaggagttctacaagttcatcaaaccaattctcgagaagatggacggcacggaggagcttctcgtgaagctcaaccgggaggacctcctgaggaagcagaggacgttcgacaacggctcgataccgcatcagatccacctgggcgagctccacgccatcctgcgccggcaggaggatttctatccgttcctcaaggacaacagggagaagatcgagaaaattctgacgttccgcatcccgtactacgtgggccctctcgcgcgcgggaacagccggttcgcctggatgactcggaagtcggaggagacgatcacgccgtggaacttcgaggaggtggtggacaagggcgcctccgcccagtcgttcatcgagcgcatgacgaacttcgataaaaatctgcccaatgaaaaagtgctcccgaagcacagcctcctctacgagtacttcacggtgtacaacgagctcacgaaggtgaagtacgtgaccgagggtatgcggaagccggcgttcctgagcggcgagcagaagaaggccatcgtggacctcctcttcaagacgaaccggaaagtcaccgtgaagcaattaaaggaggactacttcaagaaaatagagtgcttcgacagcgtcgagatctcgggcgtcgaggacaggttcaacgcgtcgctgggcacataccacgacctcctcaagatcattaaagacaaggacttcctggacaacgaggagaacgaggacatcctcgaggacatcgtgctgaccctcaccctgtttgaggaccgggagatgatcgaggagcgcctcaagacgtacgctcaccttttcgacgacaaggtgatgaaacagctgaagcggcgccgctacaccggatggggccggctctcccgcaagctcattaatgggatcagggacaagcagtccggcaagaccatactcgatttcctgaagagcgacggcttcgccaaccggaacttcatgcagctcatccacgacgactccctcactttcaaggaggacatccagaaggcccaggtcagcggacagggcgactcgctccacgaacacatcgccaacctggccgggtcgcctgcgattaaaaagggaatccttcagaccgtcaaggtcgtggacgagctggtgaaggtgatgggcaggcacaagcccgaaaatatcgtcattgagatggcccgggagaaccagaccacgcagaaaggccagaagaacagccgggagcgcatgaaacggatcgaggagggtatcaaggagctgggctcgcagatcctcaaggagcaccctgtggaaaatacccagctgcagaatgaaaagctctacctctactacctccagaacggccgcgacatgtacgtggaccaggagctggacattaatcgcctctcggactacgacgtcgaccacatcgtcccgcagtccttcctgaaggacgacagcatcgacaacaaggtcttgacccgctccgataaaaatcgcgggaagtccgacaacgtgccgtcggaggaggtggtcaagaagatgaaaaactactggcgccagctgctcaacgccaagctaatcacgcagcgcaagttcgacaacctcaccaaggccgaacgcggcggtctctccgagcttgataaggctgggttcatcaagagacagctggtggagacccggcagatcaccaagcatgtcgcccagatcctggactcgcgcatgaatactaagtacgatgaaaacgacaagctcatccgcgaggtgaaggtgatcaccctgaagagcaagctggtctcggacttccggaaggacttccagttctacaaggtccgggagatcaacaactaccaccacgcgcacgacgcctacctgaacgcggtggtgggcacagcccttataaagaagtaccctaagctcgagtccgagttcgtgtacggcgactacaaggtgtacgacgtccgcaagatgatcgcgaagagcgagcaggagatcgggaaggccaccgcaaaatacttcttctactccaacatcatgaacttcttcaagaccgagatcaccctggccaacggggagatccgcaagcgcccgctgattgagacgaacggagagacaggcgagatagtctgggacaagggcagggacttcgccaccgtgcgcaaggttctgtccatgccgcaggtgaacatcgtgaagaagactgaggtgcagacaggcggcttctcgaaggagtccatcctgcccaagcggaacagcgacaagctcatcgcgcggaagaaggactgggaccctaaaaaatatggcgggttcgactcgcccaccgtggcttactcggtcctcgtggtggccaaggtcgagaagggcaaaagcaagaagctgaagagcgtcaaggagctcctcggcatcaccatcatggagcggtccagcttcgagaagaacccgatcgacttcctcgaggcgaagggatataaggaggtgaagaaggacctcatcattaaactgccgaagtactcgctattcgaactggagaatggtcgcaagaggatgctcgcgagcgctggcgagctgcagaaagggaacgagctggctctcccgagcaagtacgtcaacttcctctacctggcctcccactatgaaaagctcaagggctcgccggaggacaacgagcagaagcagctgttcgtcgagcagcacaagcattacctcgacgagatcatcgagcagatctcggagttcagcaagcgcgtgatcctggccgacgccaacctcgacaaggtgctgtccgcatataacaagcaccgcgacaaaccaatacgggagcaggccgaaaatatcatccacctgttcaccctcacgaacctgggcgcccccgccgcgttcaagtacttcgacacaaccatcgaccgcaagcggtacacgagcacgaaggaggtgctggacgccacgttgattcaccagtccatcacgggcctgtatgaaacaaggatcgatctcagccagctcggcggcgactaggtaccacatggttaacctagacttgtccatcttctggattggccaacttaattaatgtatgaaataaaaggatgcacacatagtgacatgctaatcactataatgtgggcatcaaagttgtgtgttatgtgtaattactagttatctgaataaaagagaaagagatcatccatatttcttatcctaaatgaatgtcacgtgtctttataattctttgatgaaccagatgcatttcattaaccaaatccatatacatataaatattaatcatatataattaatatcaattgggttagcaaaacaaatctagtctaggtgtgttttgcgaattgcggc

SEQ ID NO: 194 - DNA, 100 bp, Artificial sequence
  DNA version of guide RNA (EPSPS sgRNA)
gcagtaacagctgctgtcaagttttagagctagaaatagcaagttaaaataaggctagtccgttatcaacttgaaaaagtggcaccgagtcggtgctttt

SEQ ID NO: 195 - DNA, 3708 bp, Artificial sequence
  EPSPS polynucleotide template
ctgcagcccatcaaggagatctccggcaccgtcaagctgccggggtccaagtcgctttccaacaggatcctcctgctcgccgccctgtccgaggtgagcgattttggtgcttgctgcgctgccctgtctcactgctacctaaatgttttgcctgtcgaataccatggattctcggtgtaatccatctcacgatcagatgcaccgcatgtcgcatgcctagctctctctaatttgtctagtagtttgtatacggattaagattgataaatcggtaccgcaaaagctaggtgtaaataaacactacaaaattggatgttcccctatcggcctgtactcggctactcgttcttgtgatggcatgttatttcttcttggtgtttggtgaactcccttatgaaatttgggcgcaaagaaatcgccctcaagggttgatcttatgccatcgtcatgataaacagtgaagcacggatgatcctttacgttgtttttaacaaactttgtcagaaaactagcaatgttaacttcttaatgatgatttcacaacaaaaaaggtaaccttgctactaacataacaaaagacttgttgcttattaattatatgtttttttaatctttgatcaggggacaacagtggttgataacctgttgaacagtgaggatgtccactacatgctcggggccttgaggactcttggtctctctgtcgaagcggacaaagctgccaaaagagctgtagttgttggctgtggtggaaagttcccagttgaggatgctaaagaggaagtgcagctcttcttggggaatgctggaatcgcaatgcggtcattgacagcagctgttactgctgctggtggaaatgcaacgtatgtttcctctctctctctacaatacttgttggagttagtatgaaacccatgtgtatgtctagtggcttatggtgtattggtttttgaacttcagttacgtgcttgatggagtaccaagaatgagggagagacccattggcgacttggttgtcggattgaagcagcttggtgcagatgttgattgtttccttggcactgactgcccacctgttcgtgtcaatggaatcggagggctacctggtggcaaggttagttactaagggccacatgttacattcttctgtaaatggtacaactattgtcgagcttttgcatttgtaaggaaaacattgattgatctgaatttgatgctacaccacaaaatatctacaaatggtcatccctaactagcaaaccatgtctccattaagctcaatgaagtaatacttggcatgtgtttatcaacttaatttccatcttctggggtattgcctgttttctagtctaatagcatttgtttttagaattagctcttacaactgttatgttctacaggtcaagctgtctggctccatcagcagtcagtacttgagtgccttgctgatggctgctcctttggctcttggggatgtggagattgaaatcattgataaattaatctccattccctacgtcgaaatgacattgagattgatggagcgttttggtgtgaaagcagagcattctgatagctgggacagattctacattaagggaggtcaaaaatacaagtaagctctgtaatgtatttcactactttgatgccaatgtttcagttttcagttttccaaacagtcgcatcaatatttgaatagatgcactgtagaaaaaaatcattgcagggaaaaactagtactgagtattttgactgtaaattatttaaccagtcggaatatagtcagtctattggagtcaagagcgtgaaccgaaatagccagttaattatcccattatacagaggacaaccatgtatactattgaaacttggtttaagagaatctaggtagctggactcgtagctgcttggcatggataccttcttatctttaggaaaagacacttgattttttttctgtggccctctatgatgtgtgaacctgcttctctattgctttagaaggatatatctatgtcgttatgcaacatgcttcccttagtcatttgtactgaaatcagtttcataagttcgttagtggttccctaaacgaaaccttgtttttctttgcaatcaacaggtcccctaaaaatgcctatgttgaaggtgatgcctcaagcgcaagctatttcttggctggtgctgcaattactggagggactgtgactgtggaaggttgtggcaccaccagtttgcaggtaaagatttcttggctggtgctacgataactgcttttgtctttttggtttcagcattgttctcagagtcactaaataacattatcatctgcaaacgtcaaatagacatacttaggtgaatggatattcatgtaaccgtttccttacaaatttgctgaaacctcagggtgatgtgaagtttgctgaggtactggagatgatgggagcgaaggttacatggaccgagactagcgtaactgttactggcccaccgcgggagccatttgggaggaaacacctcaaggcgattgatgtcaacatgaacaagatgcctgatgtcgccatgactcttgctgtggttgccctctttgccgatggcccgacagccatcagagacggtaaaacattctcagccctacaaccatgcctcttctacatcactacttgacaagactaaaaactattggctcgttggcagtggcttcctggagagtaaaggagaccgagaggatggttgcgatccggacggagctaaccaaggtaaggctacatacttcacatgtctcacgtcgtctttccatagctcgctgcctcttagcggcttgcctgcggtcgctccatcctcggttgctgtctgtgttttccacagctgggagcatctgttgaggaagggccggactactgcatcatcacgccgccggagaagctgaacgtgacggcgatcgacacgtacgacgaccacaggatggccatggccttctcccttgccgcctgtgccgaggtccccgtgaccatccgggaccctgggtgcacccggaagaccttccccgactacttcgatgtgctgagcactttcgtcaagaattaataaagcgtgcgatactaccacgcagcttgattgaagtgataggcttgtgctgaggaaatacatttcttttgttctgttttttctctttcacgggattaagttttgagtctgtaacgttagttgtttgtagcaagtttctatttcggatcttaagtttgtgcactgtaagccaaatttcatttcaagagtggttcgttggaataataagaataataaattacgtttcagtggctgtcaagcctgctgctacgttttaggagatggcattagacattcatcatcaacaacaataaaaccttttagcctcaaacaataatagtgaagttattttttagtcctaaacaagttgcattaggatatagttaaaacacaaaagaagctaaagttagggtttagacatgtggatattgttttccatgtatagtatgttctttctttgagtctcatttaactacctctacacataccaactttagttttttttctacctcttcatgttactatggtgccttcttatcccactgagcattggtatatttagaggtttttgttgaacatgcctaaatcatctcaatcaacgatggacaatcttttcttcgattgagctgaggtacgtcatctaga

SEQ ID NO: 196 - DNA, 15 bp, Artificial sequence
  TIPS nucleotide modifications
atcgcaatgcggtca

SEQ ID NO: 197 - DNA, 19 bp, Artificial sequence
  Primer Seqeunce-1 F-E2
ccgaggagatcgtgctgca

SEQ ID NO: 198 - DNA, 20 bp, Artificial sequence
  Primer Seqeunce-2 F-E2
caatggccgcattgcagttc

SEQ ID NO: 199 - DNA, 19 bp, Artificial sequence
  Primer Seqeunce-1 F-T
ccgaggagatcgtgctgca

SEQ ID NO: 200 - DNA, 20 bp, Artificial sequence
  Primer Seqeunce-2 F-T
tgaccgcattgcgattccag

SEQ ID NO: 201 - DNA, 24 bp, Artificial sequence
  Primer Seqeunce-1 H-T
tccaagtcgctttccaacaggatc

SEQ ID NO: 202 - DNA, 20 bp, Artificial sequence
  Primer Seqeunce-2 H-T
tgaccgcattgcgattccag

SEQ ID NO: 203 - DNA, 19 bp, Artificial sequence
  Primer Seqeunce-1 F-E3
ccgaggagatcgtgctgca

SEQ ID NO: 204 - DNA, 24 bp, Artificial sequence
  Primer Seqeunce-2 F-E3
accaagctgcttcaatccgacaac

SEQ ID NO: 205 - DNA, 63 bp, Artificial sequence
  DNA fragment with intact Cas target sequence
ggggaatgctggaactgcaatgcggccattgacagcagctgttactgctgctggtggaaatgc

SEQ ID NO: 206 - DNA, 60 bp, Artificial sequence
  DNA fragment with mutated Cas target sequence
ggggaatgctggaactgcaatgcggccattggcagctgttactgctgctggtggaaatgc

SEQ ID NO: 207 - DNA, 50 bp, Artificial sequence
  DNA fragment with mutated Cas target sequence
ggggaatgctggaactgcacagcagctgttactgctgctggtggaaatgc

SEQ ID NO: 208 - DNA, 33 bp, Artificial sequence
  DNA fragment with mutated Cas target sequence
ggggaatgctgttactgctgctggtggaaatgc

SEQ ID NO: 209 - DNA, 51 bp, Artificial sequence
  TIPS edited EPSPS nucleotide sequence fragment
aatgctggaatcgcaatgcggtcattgacagcagctgttactgctgctggt

SEQ ID NO: 210 - DNA, 51 bp, Artificial sequence
  Wild-type epsps nucleotide sequence  fragment
aatgctggaactgcaatgcggccattgacagcagctgttactgctgctggt

SEQ ID NO: 211 - DNA, 5124 bp, Zea mays
atggcggccatggcgaccaaggccgccgcgggcaccgtgtcgctggacctcgccgcgccgccggcggcggcagcggcggcggcggtgcaggcgggtgccgaggagatcgtgctgcagcccatcaaggagatctccggcaccgtcaagctgccggggtccaagtcgctttccaacaggatcctcctgctcgccgccctgtccgaggtgagcgattttggtgcttgctgcgctgccctgtctcactgctacctaaatgttttgcctgtcgaataccatggattctcggtgtaatccatctcacgatcagatgcaccgcatgtcgcatgcctagctctctctaatttgtctagtagtttgtatacggattaagattgataaatcggtaccgcaaaagctaggtgtaaataaacactacaaaattggatgttcccctatcggcctgtactcggctactcgttcttgtgatggcatgttatttcttcttggtgtttggtgaactcccttatgaaatttgggcgcaaagaaatcgccctcaagggttgatcttatgccatcgtcatgataaacagtgaagcacggatgatcctttacgttgtttttaacaaactttgtcagaaaactagcaatgttaacttcttaatgatgatttcacaacaaaaaaggtaaccttgctactaacataacaaaagacttgttgcttattaattatatgtttttttaatctttgatcaggggacaacagtggttgataacctgttgaacagtgaggatgtccactacatgctcggggccttgaggactcttggtctctctgtcgaagcggacaaagctgccaaaagagctgtagttgttggctgtggtggaaagttcccagttgaggatgctaaagaggaagtgcagctcttcttggggaatgctggaactgcaatgcggccattgacagcagctgttactgctgctggtggaaatgcaacgtatgtttcctctctctctctacaatacttgttggagttagtatgaaacccatgtgtatgtctagtggcttatggtgtattggtttttgaacttcagttacgtgcttgatggagtaccaagaatgagggagagacccattggcgacttggttgtcggattgaagcagcttggtgcagatgttgattgtttccttggcactgactgcccacctgttcgtgtcaatggaatcggagggctacctggtggcaaggttagttactaagggccacatgttacattcttctgtaaatggtacaactattgtcgagcttttgcatttgtaaggaaaacattgattgatctgaatttgatgctacaccacaaaatatctacaaatggtcatccctaactagcaaaccatgtctccattaagctcaatgaagtaatacttggcatgtgtttatcaacttaatttccatcttctggggtattgcctgttttctagtctaatagcatttgtttttagaattagctcttacaactgttatgttctacaggtcaagctgtctggctccatcagcagtcagtacttgagtgccttgctgatggctgctcctttggctcttggggatgtggagattgaaatcattgataaattaatctccattccctacgtcgaaatgacattgagattgatggagcgttttggtgtgaaagcagagcattctgatagctgggacagattctacattaagggaggtcaaaaatacaagtaagctctgtaatgtatttcactactttgatgccaatgtttcagttttcagttttccaaacagtcgcatcaatatttgaatagatgcactgtagaaaaaaatcattgcagggaaaaactagtactgagtattttgactgtaaattatttaaccagtcggaatatagtcagtctattggagtcaagagcgtgaaccgaaatagccagttaattatcccattatacagaggacaaccatgtatactattgaaacttggtttaagagaatctaggtagctggactcgtagctgcttggcatggataccttcttatctttaggaaaagacacttgattttttttctgtggccctctatgatgtgtgaacctgcttctctattgctttagaaggatatatctatgtcgttatgcaacatgcttcccttagtcatttgtactgaaatcagtttcataagttcgttagtggttccctaaacgaaaccttgtttttctttgcaatcaacaggtcccctaaaaatgcctatgttgaaggtgatgcctcaagcgcaagctatttcttggctggtgctgcaattactggagggactgtgactgtggaaggttgtggcaccaccagtttgcaggtaaagatttcttggctggtgctacgataactgcttttgtctttttggtttcagcattgttctcagagtcactaaataacattatcatctgcaaacgtcaaatagacatacttaggtgaatggatattcatgtaaccgtttccttacaaatttgctgaaacctcagggtgatgtgaagtttgctgaggtactggagatgatgggagcgaaggttacatggaccgagactagcgtaactgttactggcccaccgcgggagccatttgggaggaaacacctcaaggcgattgatgtcaacatgaacaagatgcctgatgtcgccatgactcttgctgtggttgccctctttgccgatggcccgacagccatcagagacggtaaaacattctcagccctacaaccatgcctcttctacatcactacttgacaagactaaaaactattggctcgttggcagtggcttcctggagagtaaaggagaccgagaggatggttgcgatccggacggagctaaccaaggtaaggctacatacttcacatgtctcacgtcgtctttccatagctcgctgcctcttagcggcttgcctgcggtcgctccatcctcggttgctgtctgtgttttccacagctgggagcatctgttgaggaagggccggactactgcatcatcacgccgccggagaagctgaacgtgacggcgatcgacacgtacgacgaccacaggatggccatggccttctcccttgccgcctgtgccgaggtccccgtgaccatccgggaccctgggtgcacccggaagaccttccccgactacttcgatgtgctgagcactttcgtcaagaattaataaagcgtgcgatactaccacgcagcttgattgaagtgataggcttgtgctgaggaaatacatttcttttgttctgttttttctctttcacgggattaagttttgagtctgtaacgttagttgtttgtagcaagtttctatttcggatcttaagtttgtgcactgtaagccaaatttcatttcaagagtggttcgttggaataataagaataataaattacgtttcagtggctgtcaagcctgctgctacgttttaggagatggcattagacattcatcatcaacaacaataaaaccttttagcctcaaacaataatagtgaagttattttttagtcctaaacaagttgcattaggatatagttaaaacacaaaagaagctaaagttagggtttagacatgtggatattgttttccatgtatagtatgttctttctttgagtctcatttaactacctctacacataccaactttagttttttttctacctcttcatgttactatggtgccttcttatcccactgagcattggtatatttagaggtttttgttgaacatgcctaaatcatctcaatcaacgatggacaatcttttcttcgattgagctgaggtacgtcatctagaggataggaccttgagaatatgtgtccgtcaatagctaaccctctactaattttttcaatcaagcaacctattggcttgactttaattcgtaccggcttctactacttctacagtattttgtctctataaattgcagctacaacagtcagaacggctggctttaaaatcaaatggcctaaggatcattgaaaggcatcttagcaatgtctaaaattattaccttctctagacgttgatatctttgctccggattcgatcccttgttgtatgaccacaaatccaacaccaaatacgcatttctgcaacacacccaaacaccccttccaaataagtggaatggttgagaaatttgctattttgattaaatattggtgaaggggcaaggctgaggaaacgagacgaaggttccttgacagctgaaaaatggaacactctagaggcggagggagcgaggcgagctgtgtgaattgccacccattgattaagaatccaacaacttgactagcaaatgccgacatgggtagcctacaaaggcgagttttggagctggtttcgtaataaggaaatttctcaaccaactactttccttagaaaagagttgcttgaccggatcaacatctccccctaaaccccttggagggggagggggctaagattttaatctacaagttagatctaactgtccacctcaatccccctcaaggaggtttttgtattatttgttagtgtagaatgataaagtggatgtattgataggagatggggtacacatatttatagggactcaaccctaaccctaatgggtcggcagcccaacagtggtgtccggcccacacacacactcacacacacagtctaacatcccccgcagtcgcaacggggacaccacacacgatgagactggagtagaggccgaaggtaggagccgacgggttgaaatcccccctagtcgcagcgtcgtgatagtacgaatgttgcggctggagtagagaccggtgtgtgctccaagaagacgatagcccctagatgccgaggtagccgaagtcgaggtggtcgcggtcggaagacgcgcagcaaaagcctgatcttcgggatggtcgacgttcgagcgtcaacgatcggtagggcgacacaataaaagggcaccagcaggtcgaccttcctgcttcttcgatcgtccagacgtcaaggagcctcgctagggaggccgacggcagcgcacgcggctacgccggtcatggtgtcctcacccgcggcagaaaagaaggggaatgtcggatccgaccgagaaggccacggcagcga

SEQ ID NO: 212 - DNA, 3387 bp, S. thermophilus
atgagtgacttagttttaggacttgatatcggtataggttctgttggtgtaggtatccttaacaaagtgacaggagaaattatccataaaaactcacgcatcttcccagcagctcaagcagaaaataacctagtacgtagaacgaatcgtcaaggaagacgcttgacacgacgtaaaaaacatcgtatagttcgtttaaatcgtctatttgaggaaagtggattaatcaccgattttacgaagatttcaattaatcttaacccatatcaattacgagttaagggcttgaccgatgaattgtctaatgaagaactgtttatcgctcttaaaaatatggtgaaacaccgtgggattagttacctcgatgatgctagtgatgacggaaattcatcagtaggagactatgcacaaattgttaaggaaaatagtaaacaattagaaactaagacaccgggacagatacagttggaacgctaccaaacatatggtcaattacgtggtgattttactgttgagaaagatggcaaaaaacatcgcttgattaatgtctttccaacatcagcttatcgttcagaagccttaaggatactgcaaactcaacaagaatttaatccacagattacagatgaatttattaatcgttatctcgaaattttaactggaaaacggaaatattatcatggacccggaaatgaaaagtcacggactgattatggtcgttacagaacgagtggagaaactttagacaatatttttggaattctaattgggaaatgtacattttatccagaagagtttagagcagcaaaagcttcctacacggctcaagaattcaatttgctaaatgatttgaacaatctaacagttcctactgaaaccaaaaagttgagcaaagaacagaagaatcaaatcattaattatgtcaaaaatgaaaaggcaatggggccagcgaaactttttaaatatatcgctaagttactttcttgtgatgttgcagatatcaagggataccgtatcgacaaatcaggtaaggctgagattcatactttcgaagcctatcgaaaaatgaaaacgcttgaaaccttagatattgaacaaatggatagagaaacgcttgataaattagcctatgtcttaacattaaacactgagagggaaggtattcaagaagccttagaacatgaatttgctgatggtagctttagccagaagcaagttgacgaattggttcaattccgcaaagcaaatagttccatttttggaaaaggatggcataatttttctgtcaaactgatgatggagttaattccagaattgtatgagacgtcagaagagcaaatgactatcctgacacgacttggaaaacaaaaacgacttcgtcttcaaataaaacaaaatatttcaaataaaacaaaatatatagatgagaaactattaactgaagaaatctataatcctgttgttgctaagtctgttcgccaggctataaaaatcgtaaatgcggcgattaaagaatacggagactttgacaatattgtcatcgaaatggctcgtgaaacaaatgaagatgatgaaaagaaagctattcaaaagattcaaaaagccaacaaagatgaaaaagatgcagcaatgcttaaggctgctaaccaatataatggaaaggctgaattaccacatagtgttttccacggtcataagcaattagcgactaaaatccgcctttggcatcagcaaggagaacgttgcctttatactggtaagacaatctcaatccatgatttgataaataatcctaatcagtttgaagtagatcatattttacctctttctatcacattcgatgatagccttgcaaataaggttttggtttatgcaactgctaaccaagaaaaaggacaacgaacaccttatcaggctttagatagtatggatgatgcgtggtctttccgtgaattaaaagcttttgtacgtgagtcaaaaacactttcaaacaagaaaaaagaatacctccttacagaagaagatatttcaaagtttgatgttcgaaagaaatttattgaacgaaatcttgtagatacaagatacgcttcaagagttgtcctcaatgcccttcaagaacactttagagctcacaagattgatacaaaagtttccgtggttcgtggccaatttacatctcaattgagacgccattggggaattgagaagactcgtgatacttatcatcaccatgctgtcgatgcattgattattgccgcctcaagtcagttgaatttgtggaaaaaacaaaagaatacccttgtaagttattcagaagaacaactccttgatattgaaacaggtgaacttattagtgatgatgagtacaaggaatctgtgttcaaagccccttatcaacattttgttgatacattgaagagtaaagaatttgaagacagtatcttattctcatatcaagtggattctaagtttaatcgtaaaatatcagatgccactatttatgcgacaagacaggctaaagtgggaaaagataagaaggatgaaacttatgtcttagggaaaatcaaagatatctatactcaggatggttatgatgcctttatgaagatttataagaaggataagtcaaaattcctcatgtatcgtcacgacccacaaacctttgagaaagttatcgagccaattttagagaactatcctaataagcaaatgaatgaaaaaggaaaagaggtaccatgtaatcctttcctaaaatataaagaagaacatggctatattcgtaaatatagtaaaaaaggcaatggtcctgaaatcaagagtcttaaatactatgatagtaagcttttaggtaatcctattgatattactccagagaatagtaaaaataaagttgtcttacagtcattaaaaccttggagaacagatgtctatttcaataaggctactggaaaatacgaaatccttggattaaaatatgctgatctacaatttgagaaagggacaggaacatataagatttcccaggaaaaatacaatgacattaagaaaaaagagggtgtagattctgattcagaattcaagtttacactttataaaaatgatttgttactcgttaaagatacagaaacaaaagaacaacagcttttccgttttctttctcgaactttacctaaacaaaagcattatgttgaattaaaaccttatgataaacagaaatttgaaggaggtgaggcgttaattaaagtgttgggtaacgttgctaatggtggtcaatgcataaaaggactagcaaaatcaaatatttctatttataaagtaagaacagatgtcctaggaaatcagcatatcatcaaaaatgagggtgataagcctaagctagatttttaa

SEQ ID NO: 213 - DNA, 3369 bp, S. thermophilus
atgagtgacttagttttaggacttgatatcggtataggttctgttggtgtaggtatccttaacaaagtgacaggagaaattatccataaaaactcacgcatcttcccagcagctcaagcagaaaataacctagtacgtagaacgaatcgtcaaggaagacgcttgacacgacgtaaaaaacatcgtatagttcgtttaaatcgtctatttgaggaaagtggattaatcaccgattttacgaagatttcaattaatcttaacccatatcaattacgagttaagggcttgaccgatgaattgtctaatgaagaactgtttatcgctcttaaaaatatggtgaaacaccgtgggattagttacctcgatgatgctagtgatgacggaaattcatcagtaggagactatgcacaaattgttaaggaaaatagtaaacaattagaaactaagacaccgggacagatacagttggaacgctaccaaacatatggtcaattacgtggtgattttactgttgagaaagatggcaaaaaacatcgcttgattaatgtctttccaacatcagcttatcgttcagaagccttaaggatactgcaaactcaacaagaatttaattcacagattacagatgaatttattaatcgttatctcgaaattttaactggaaaacggaaatattatcatggacccggaaatgaaaagtcacggactgattatggtcgttacagaacgaatggagaaactttagacaatatttttggaattctaattgggaaatgtacattttatccagacgagtttagagcagcaaaagcttcctacacggctcaagaattcaatttgctaaatgatttgaacaatctaacagttcctactgaaaccaaaaagttgagcaaagaacagaagaatcaaatcattaattatgtcaaaaatgaaaaggtaatggggccagcgaaactttttaaatatatcgctaaattactttcttgtgatgttgcagatatcaagggacaccgtatcgacaaatcaggtaaggctgagattcatactttcgaagcctatcgaaaaatgaaaacgcttgaaaccttagatattgagcaaatggatagagaaacgcttgataaattagcctatgtcttaacattaaacactgagagggaaggtattcaagaagctttagaacatgaatttgctgatggtagctttagccagaagcaagttgacgaattggttcaattccgcaaagcaaatagttccatttttggaaaaggatggcataatttttctgtcaaactgatgatggagttaattccagaattgtatgagacgtcagaagagcaaatgactatcctgacacgacttggaaaacaaaaaacaacttcgtcttcaaataaaacaaaatatatagatgagaaactattaactgaagaaatctataatcctgttgttgctaagtctgttcgccaggctataaaaatcgtaaatgcggcgattaaagaatacggagactttgacaatattgtcatcgaaatggctcgtgaaacaaatgaagatgatgaaaagaaagctattcaaaagattcaaaaagccaacaaagatgaaaaagatgcagcaatgcttaaggctgctaaccaatataatggaaaggctgaattaccacatagtgttttccacggtcataagcaattagcgactaaaatccgcctttggcatcagcaaggagaacgttgcctttatactggtaagacaatctcaatccatgatttgataaataatcctaatcagtttgaagtagatcatattttacctctttctatcacattcgatgatagccttgcaaataaggttttggtttatgcaactgctaaccaagaaaaaggacaacgaacaccttatcaggctttagatagtatggatgatgcgtggtctttccgtgaattaaaagcttttgtacgtgagtcaaaaacactttcaaacaagaaaaaagaatacctccttacagaagaagatatttcaaagtttgatgttcgaaagaaatttattgaacgaaatcttgtagatacaagatacgcttcaagagttgtcctcaatgcccttcaagaacactttagagctcacaagattgatacaaaagtttccgtggttcgtggccaatttacatctcaattgagacgccattggggaattgagaagactcgtgatacttatcatcaccatgctgtcgatgcattgattattgccgcctcaagtcagttgaatttgtggaaaaaacaaaagaatacccttgtaagttattcagaagaacaactccttgatattgaaacaggtgaacttattagtgatgatgagtacaaggaatctgtgttcaaagccccttatcaacattttgttgatacattgaagagtaaagaatttgaagacagtatcttattctcatatcaagtggattctaagtttaatcgtaaaatatcagatgccactatttatgcgacaagacaggctaaagtgggaaaagataagaaggatgaaacttatgtcttagggaaaatcaaagatatctatactcaggatggttatgatgcctttatgaagatttataagaaggataagtcaaaattcctcatgtatcgtcacgacccacaaacctttgagaaagttatcgagccaattttagagaactatcctaataaggaaatgaatgaaaaagggaaagaagtaccatgtaatcctttcctaaaatataaagaagaacatggctatattcgtaaatatagtaaaaaaggcaatggtcctgaaatcaagagtcttaaatactatgatagtaagcttttaggtaatcctattgatattactccagagaatagtaaaaataaagttgtcttacagtcattaaaaccttggagaacagatgtctatttcaataaaaatactggtaaatatgaaattttaggactgaaatatgctgatttacaatttgaaaagaagacaggaacatataagatttcccaggaaaaatacaatggcattatgaaagaagagggtgtagattctgattcagaattcaagtttacactttataaaaatgatttgttactcgttaaagatacagaaacaaaagaacaacagcttttccgttttctttctcgaactatgcctaatgtgaaatattatgtagagttaaagccttattcaaaagataaatttgagaagaatgagtcacttattgaaattttaggttctgcagataagtcaggacgatgtataaaagggctaggaaaatcaaatatttctatttataaggtaagaacagatgtcctaggaaatcagcatatcatcaaaaatgagggtgataagcctaagctagatttttaa

SEQ ID NO: 214 - DNA, 4113 bp, S. agalactiae
atgaataagccatattcaataggccttgacatcggtactaattccgtcggatggagcattattacagatgattataaagtacctgctaagaagatgagagttttagggaacactgataaagaatatattaagaagaatctcataggtgctctgctttttgatggcgggaatactgctgcagatagacgcttgaagcgaactgctcgtcgtcgttatacacgtcgtagaaatcgtattctatatttacaagaaatttttgcagaggaaatgagtaaagttgatgatagtttctttcatcgattagaggattcttttctagttgaggaagataagagagggagcaagtatcctatctttgcaacattgcaggaagagaaagattatcatgaaaaattttcgacaatctatcatttgagaaaagaattagctgacaagaaagaaaaagcagaccttcgtcttatttatattgctctagctcatatcattaaatttagagggcatttcctaattgaggatgatagctttgatgtcaggaatacagacatttcaaaacaatatcaagattttttagaaatctttaatacaacttttgaaaataatgatttgttatctcaaaacgttgacgtagaggcaatactaacagataagattagcaagtctgcgaagaaagatcgtattttagcgcagtatcctaaccaaaaatctactggcatttttgcagaatttttgaaattgattgtcggaaatcaagctgacttcaagaaatatttcaatttggaggataaaacgccgcttcaattcgctaaggatagctacgatgaagatttagaaaatcttcttggacagattggtgatgaatttgcagacttattctcagcagcgaaaaagttatatgatagtgtccttttgtctggcattcttacagtaatcgacctcagtaccaaggcgccactttcagcttctatgattcagcgttatgatgaacatagagaggacttgaaacagttaaaacaattcgtaaaagcttcattgccggaaaaatatcaagaaatatttgctgattcatcaaaagatggctacgctggttatattgaaggtaaaactaatcaagaagctttttataaatacctgtcaaaattgttgaccaagcaagaagatagcgagaattttcttgaaaaaatcaagaatgaagatttcttgagaaaacaaaggacctttgataatggctcaattccacaccaagtccatttgacagagctgaaagctattatccgccgtcaatcagaatactatcccttcttgaaagagaatcaagataggattgaaaaaatccttacctttagaattccttattatatcgggccactagcacgtgagaagagtgattttgcatggatgactcgcaaaacagatgacagtattcgaccttggaattttgaagacttggttgataaagaaaaatctgcggaagcttttatccatcgtatgaccaacaatgatttttatcttcctgaagaaaaagttttaccaaagcatagtcttatttatgaaaaatttacggtctataatgagttgactaaggttagatataaaaatgagcaaggtgagacttatttttttgatagcaatattaaacaagaaatctttgatggagtattcaaggaacatcgtaaggtatccaagaagaagttgctagattttctggctaaagaatatgaggagtttaggatagtagatgttattggtctagataaagaaaataaagctttcaacgcctcattgggaacttaccacgatctcgaaaaaatactagacaaagattttctagataatccagataatgagtctattctggaagatatcgtccaaactctaacattatttgaagacagagaaatgattaagaagcgtcttgaaaactataaagatctttttacagagtcacaactaaaaaaactctatcgtcgtcactatactggctggggacgattgtctgctaagttaatcaatggtattcgagataaagagagtcaaaaaacaatcttggactatcttattgatgatggtagatctaatcgcaactttatgcagttgataaatgatgatggtctatctttcaaatcaattatcagtaaggcacaggctggtagtcattcagataatctaaaagaagttgtaggtgagcttgcaggtagccctgctattaaaaagggaattctacaaagtttgaaaattgttgatgagcttgttaaagtcatgggatacgaacctgaacaaattgtggttgagatggcgcgtgagaatcaaacaacaaatcaaggtcgtcgtaactctcgacaacgctataaacttcttgatgatggcgttaagaatctagctagtgacttgaatggcaatattttgaaagaatatcctacggataatcaagcgttgcaaaatgaaagacttttcctttactacttacaaaacggaagagatatgtatacaggggaagctctagatattgacaatttaagtcaatatgatattgaccacattattcctcaagctttcataaaagatgattctattgataatcgtgttttggtatcatctgctaaaaatcgtggaaagtcagatgatgttcctagccttgaaattgtaaaagattgtaaagttttctggaaaaaattacttgatgctaagttaatgagtcagcgtaagtatgataatttgactaaggcagagcgcggaggcctaacttccgatgataaggcaagatttatccaacgtcagttggttgagacacgacaaattaccaagcatgttgcccgtatcttggatgaacgctttaataatgagcttgatagtaaaggtagaaggatccgcaaagttaaaattgtaaccttgaagtcaaatttggtttcaaatttccgaaaagaatttggattctataaaattcgtgaagttaacaattatcaccatgcacatgatgcctatcttaatgcagtagttgctaaagctattctaaccaaatatcctcagttagagccagaatttgtctacggcgactatccaaaatataatagttacaaaacgcgtaaatccgctacagaaaagctatttttctattcaaatattatgaacttctttaaaactaaggtaactttagcggatggaaccgttgttgtaaaagatgatattgaagttaataatgatacgggtgaaattgtttgggataaaaagaaacactttgcgacagttagaaaagtcttgtcataccctcagaacaatatcgtgaagaagacagagattcagacaggtggtttctctaaggaatcaatcttggcgcatggtaactcagataagttgattccaagaaaaacgaaggatatttatttagatcctaagaaatatggaggttttgatagtccgatagtagcttactctgttttagttgtagctgatatcaaaaagggtaaagcacaaaaactaaaaacagttacggaacttttaggaattaccatcatggagaggtccagatttgagaaaaatccatcagctttccttgaatcaaaaggctatttaaatattagggctgataaactaattattttgcccaagtatagtctgttcgaattagaaaatgggcgtcgtcgattacttgctagtgctggtgaattacaaaaaggtaatgagctagccttaccaacacaatttatgaagttcttataccttgcaagtcgttataatgagtcaaaaggtaaaccagaggagattgagaagaaacaagaatttgtaaatcaacatgtctcttattttgatgacatccttcaattaattaatgatttttcaaaacgagttattctagcagatgctaatttagagaaaatcaataagctttaccaagataataaggaaaatatatcagtagatgaacttgctaataatattatcaatctatttacttttaccagtctaggagctccagcagcttttaaattttttgataaaatagttgatagaaaacgctatacatcaactaaagaagtacttaattctaccctaattcatcaatctattactggactttatgaaacacgtattgatttgggtaagttaggagaagattga

SEQ ID NO: 215 - DNA, 4134 bp, S. agalactiae
atgaataagccatattcaataggccttgacatcggtactaattccgtcggatggagcattattacagatgattataaagtacctgctaagaagatgagagttttagggaacactgataaagaatatattaagaagaatctcataggtgctctgctttttgatggcgggaatactgctgcagatagacgcttgaagcgaactgctcgtcgtcgttatacacgtcgtagaaatcgtattctatatttacaagaaatttttgcagaggaaatgagtaaagttgatgatagtttctttcatcgattagaggattcttttctagttgaggaagataagagaggtagcaagtatcctatctttgcaacaatgcaggaggagaaatattatcatgaaaaatttccgacaatctatcatttgagaaaagaattggctgacaagaaagaaaaagcagaccttcgtcttgtttatctggctctagctcatatcattaaattcagagggcatttcctaattgaggatgatagatttgatgtgaggaataccgatattcaaaaacaatatcaagcctttttagaaatttttgatactacctttgaaaataatcatttgttatctcaaaatgtagatgtagaagcaattctaacagataagattagcaagtctgcgaagaaggatcgcatcttagcgcagtatcctaaccaaaaatctactggtatttttgcagaatttttgaaattgattgtcggaaatcaagctgacttcaagaaacatttcaatttggaggataaaacaccgcttcaattcgctaaggatagctacgatgaagatttagaaaatcttcttggacagattggtgatgaatttgcagacttattctcagtagcgaaaaagctatatgatagtgttcttttatctggcattcttacagtaactgatctcagtaccaaggcgccactttctgcctctatgattcagcgttatgatgaacatcatgaggacttaaagcatctaaaacaattcgtaaaagcttcattacctgaaaattatcgggaagtatttgctgattcatcaaaagatggctacgctggctatattgaaggcaaaactaatcaagaagctttttataaatatctgttaaaattgttgaccaaacaagaaggtagcgagtattttcttgagaaaattaagaatgaagattttttgagaaaacagagaacctttgataatggctcaatcccgcatcaagtccatttgacagaattgagggctattattcgacgtcaatcagaatactatccattcttgaaagagaatcaagataggattgaaaaaatccttacctttagaattccttattatgtcgggccactagcacgtgagaagagtgattttgcatggatgactcgcaaaacagatgacagtattcgaccttggaattttgaagacttggttgataaagaaaaatctgcggaagcttttatccatcgcatgaccaacaatgacctctatcttccagaagaaaaagttttaccaaagcatagtcttatttatgaaaaatttactgtttacaatgaattaacgaaggttagatttttggcagaaggctttaaagattttcaatttttaaataggaagcaaaaagaaactatctttaacagcttgtttaaggaaaaacgtaaagtaactgaaaaggatattattagttttttgaataaagttgatggatatgaaggaattgcaatcaaaggaattgagaaacagtttaacgctagcctttcaacctatcatgatcttaaaaaaatacttggcaaggatttccttgataatacagataacgagcttattttggaagatatcgtccaaactctaaccttatttgaagatagagaaatgattaagaagtgtcttgacatctataaagatttttttacagagtcacagcttaaaaagctctatcgccgtcactatactggctggggacgattgtctgctaagctaataaatggcatccgaaataaagagaatcaaaaaacaatcttggactatcttattgatgatggaagtgcaaaccgaaacttcatgcagttgataaatgatgatgatctatcatttaaaccaattattgacaaggcacgaactggtagtcattcggataatctgaaagaagttgtaggtgaacttgctggtagccctgctattaaaaaagggattctacaaagtttgaaaatagttgatgagctggttaaagtcatgggctatgaacctgaacaaatcgtggttgaaatggcacgtgagaaccaaacgacagcaaaaggattaagtcgttcacgacaacgcttgacaaccttgagagaatctcttgctaatttgaagagtaatattttggaagagaaaaagcctaagtatgtgaaagatcaagttgaaaatcatcatttatctgatgaccgtcttttcctttactacttacaaaacggaagagatatgtatacaaaaaaggctctggatattgataatttaagtcaatatgatattgaccacattattcctcaagctttcataaaagatgattctattgataatcgtgttttggtatcatctgctaaaaatcgtggaaaatcagatgatgttcctagcattgaaattgtaaaagctcgcaaaatgttctggaaaaatttactggatgctaagttaatgagtcagcgtaagtatgataatttgactaaggcagagcgcggaggcctaacttccgatgataaggcaagatttatccaacgtcagttggttgagactcgacaaattaccaagcatgtagctcgtatcttggatgaacgcttcaataatgaagttgataatggtaaaaagatttgcaaggttaaaattgtaaccttgaagtcaaatttggtttcaaatttccgaaaagaatttggattctataaaattcgtgaagttaatgattatcaccatgcacacgatgcttatcttaatgcagtagttgccaaagctattctaaccaaatatccacagttagagccagagtttgtctacggaatgtatagacagaaaaaactttcgaaaatcgttcatgaggataaggaagaaaaatatagtgaagcaaccaggaaaatgtttttctactccaacttgatgaatatgttcaaaagagttgtgaggttagcagatggttctattgttgtaagaccagtaatagaaactggtagatatatgagaaaaactgcatgggataaaaagaaacactttgcgacagttagaaaagtcttgtcataccctcagaacaatatcgtgaagaagacagagattcagacaggtggtttctctaaggaatcaatcttggcgcatggtaactcagataagttgattccaagaaaaacgaaggatatttatttagatcctaagaaatatggaggttttgatagtccgatagtagcttactctgttttagttgtagctgatatcaaaaaaggtaaagcacaaaaactaaaaacagttacggaacttttaggaattaccatcatggagaggtccagatttgagaaaaatccatcagctttccttgaatcaaaaggttatttaaatattagggacgataaattaatgattttaccgaagtatagtctgttcgaattagaaaatgggcgtcgtcgattacttgctagtgctggtgaattacaaaaaggtaacgagctagccttaccaacacaatttatgaagttcttataccttgcaagtcgttataatgagtcaaaaggtaaaccagaggagattgagaagaaacaagaatttgtaaatcaacatgtctcttattttgatgacatccttcaattaattaatgatttttcaaaacgagttattctagcagatgctaatttagagaaaatcaataagctttaccaggataataaggaaaatataccagtagatgaacttgctaataatattatcaatctatttacttttaccagtctaggagctccagcagcttttaaattttttgataaaatagttgatagaaaacgctatacatcaactaaagaagtacttaattctactctaatccatcaatctattactggactttatgaaacacgtattgatttgggtaaattaggagaagattga

SEQ ID NO: 216 - DNA, 4038 bp, S. mutans
atgaaaaaaccttactctattggacttgatattggaaccaattctgttggttgggctgttgtgacagatgactacaaagttcctgctaagaagatgaaggttctgggaaatacagataaaagtcatatcgagaaaaatttgcttggcgctttattatttgatagcgggaatactgcagaagacagacggttaaagagaactgctcgccgtcgttacacacgtcgcagaaatcgtattttatatttgcaagagattttttcagaagaaatgggcaaggtagatgatagtttctttcatcgtttagaggattcttttcttgttactgaggataaacgaggagagcgccatcccatttttgggaatcttgaagaagaagttaagtatcatgaaaattttccaaccatttatcatttgcggcaatatcttgcggataatccagaaaaagttgatttgcgtttagtttatttggctttggcacatataattaagtttagaggtcattttttaattgaaggaaagtttgatacacgcaataatgatgtacaaagactgtttcaagaatttttagcagtctatgataatacttttgagaatagttcgcttcaggagcaaaatgttcaagttgaagaaattctgactgataaaatcagtaaatctgctaagaaagatagagttttgaaactttttcctaatgaaaagtctaatggccgctttgcagaatttctaaaactaattgttggtaatcaagctgattttaaaaagcattttgaattagaagagaaagcaccattgcaattttctaaagatacttatgaagaagagttagaagtactattagctcaaattggagataattacgcagagctctttttatcagcaaagaaactgtatgatagtatccttttatcagggattttaacagttactgatgttggtaccaaagcgcctttatctgcttcgatgattcagcgatataatgaacatcagatggatttagctcagcttaaacaattcattcgtcagaaattatcagataaatataacgaagttttttctgatgtttcaaaagacggctatgcgggttatattgatgggaaaacaaatcaagaagctttttataaataccttaaaggtctattaaataagattgagggaagtggctatttccttgataaaattgagcgtgaagattttctaagaaagcaacgtacctttgacaatggctctattccacatcagattcatcttcaagaaatgcgtgctatcattcgtagacaggctgaattttatccgtttttagcagacaatcaagataggattgagaaattattgactttccgtattccctactatgttggtccattagcgcgcggaaaaagtgattttgcttggttaagtcggaaatcggctgataaaattacaccatggaattttgatgaaatcgttgataaagaatcctctgcagaagcttttatcaatcgtatgacaaattatgatttgtacttgccaaatcaaaaagttcttcctaaacatagtttattatacgaaaaatttactgtttacaatgaattaacaaaggttaaatataaaacagagcaaggaaaaacagcattttttgatgccaatatgaagcaagaaatctttgatggcgtatttaaggtttatcgaaaagtaactaaagataaattaatggatttccttgaaaaagaatttgatgaatttcgtattgttgatttaacaggtctggataaagaaaataaagtatttaacgcttcttatggaacttatcatgatttgtgtaaaattttagataaagattttctcgataattcaaagaatgaaaagattttagaagatattgtgttgaccttaacgttatttgaagatagagaaatgattagaaaacgtctagaaaattacagtgatttattgaccaaagaacaagtgaaaaagctggaaagacgtcattatactggttggggaagattatcagctgagttaattcatggtattcgcaataaagaaagcagaaaaacaattcttgattatctcattgatgatggcaatagcaatcggaactttatgcaactgattaacgatgatgctctttctttcaaagaagagattgctaaggcacaagttattggagaaacagacaatctaaatcaagttgttagtgatattgctggcagccctgctattaaaaaaggaattttacaaagcttgaagattgttgatgagcttgtcaaaattatgggacatcaacctgaaaatatcgtcgtggagatggcgcgtgaaaaccagtttaccaatcagggacgacgaaattcacagcaacgtttgaaaggtttgacagattctattaaagaatttggaagtcaaattcttaaagaacatccggttgagaattcacagttacaaaatgatagattgtttctatattatttacaaaacggcagagatatgtatactggagaagaattggatattgattatctaagccagtatgatatagaccatattatcccgcaagcttttataaaggataattctattgataatagagtattgactagctcaaaggaaaatcgtggaaaatcggatgatgtaccaagtaaagatgttgttcgtaaaatgaaatcctattggagtaagctactttcggcaaagcttattacacaacgtaaatttgataatttgacaaaagctgaacgaggtggattgaccgacgatgataaagctggattcatcaagcgtcaattagtagaaacacgacaaattaccaaacatgtagcacgtattctggacgaacgatttaatacagaaacagatgaaaacaacaagaaaattcgtcaagtaaaaattgtgaccttgaaatcaaatcttgtttccaatttccgtaaagagtttgaactctacaaagtgcgtgaaattaatgactatcatcatgcacatgatgcctatctcaatgctgtaattggaaaggctttactaggtgtttacccacaattggaacctgaatttgtttatggtgattatcctcattttcatggacataaagaaaataaagcaactgctaagaaatttttctattcaaatattatgaacttctttaaaaaagatgatgtccgtactgataaaaatggtgaaattatctggaaaaaagatgagcatatttctaatattaaaaaagtgctttcttatccacaagttaatattgttaagaaagtagaggagcaaacgggaggattttctaaagaatctatcttgccgaaaggtaattctgacaagcttattcctcgaaaaacgaagaaattttattgggataccaagaaatatggaggatttgatagcccgattgttgcttattctattttagttattgctgatattgaaaaaggtaaatctaaaaaattgaaaacagtcaaagccttagttggtgtcactattatggaaaagatgacttttgaaagggatccagttgcttttcttgagcgaaaaggctatcgaaatgttcaagaagaaaatattataaagttaccaaaatatagtttatttaaactagaaaacggacgaaaaaggctattggcaagtgctagggaacttcaaaagggaaatgaaatcgttttgccaaatcatttaggaaccttgctttatcacgctaaaaatattcataaagttgatgaaccaaagcatttggactatgttgataaacataaagatgaatttaaggagttgctagatgttgtgtcaaacttttctaaaaaatatactttagcagaaggaaatttagaaaaaatcaaagaattatatgcacaaaataatggtgaagatcttaaagaattagcaagttcatttatcaacttattaacatttactgctataggagcaccggctacttttaaattctttgataaaaatattgatcgaaaacgatatacttcaactactgaaattctcaacgctaccctcatccaccaatccatcaccggtctttatgaaacgcggattgatctcaataagttaggaggagactaa

SEQ ID NO: 217 - DNA, 20 bp, Artificial Sequence
  Mprimer qADH-F
caagtcgcggttttcaatca

SEQ ID NO: 218 - DNA, 21 bp, Artificial Sequence
  Primer qADH-R
tgaaggtggaagtcccaacaa

SEQ ID NO: 219 - DNA, 19 bp, Artificial Sequence
  probe ADH-VIC
tgggaagcctatctaccac

SEQ ID NO: 220 - DNA, 15 bp, Artificial Sequence
  Probe wtEPSPS
cggccattgacagca

SEQ ID NO: 221 - DNA, 20 bp, Artificial Sequence
  Forward primer qEPSPS-F
tcttggggaatgctggaact

SEQ ID NO: 222 - DNA, 21 bp, Artificial Sequence
  reverse primer qEPSPSR
caccagcagcagtaacagctg

SEQ ID NO: 223 - DNA, 17 bp, Artificial Sequence
  FAM-wtEPSPS R probe
tgctgtcaatggccgca

SEQ ID NO: 224 - DNA, 20 bp, Artificial Sequence
  forward primer qEPSPS-F
tcttggggaatgctggaact

SEQ ID NO: 225 - DNA, 20 bp, Artificial Sequence
  reverse primer q wtEPSPS RA
ccaccagcagcagtaacagc

SEQ ID NO: 226 - DNA, 21 bp, Artificial Sequence
  orward primer q epTIPS F
ggaagtgcagctcttcttggg

SEQ ID NO: 227 - DNA, 19 bp, Artificial Sequence
  reverse primer q epTIPS R
agctgctgtcaatgaccgc

SEQ ID NO: 228 - DNA, 15 bp, Artificial Sequence
  TIPS probe
aatgctggaatcgca

SEQ ID NO: 229 - DNA, 23 bp, Zea mays
  MHP14Cas1 target site (1)..(23)
gttaaatctgacgtgaatctgtt

SEQ ID NO: 230 - DNA, 21 bp, Zea mays
  MHP14Cas3 target site (1)..(21)
acaaacattgaagcgacatag

SEQ ID NO: 231 - DNA, 18 bp, Zea mays
  TS8Cas1 target site (1)..(18)
gtacgtaacgtgcagtac

SEQ ID NO: 232 - DNA, 20 bp, Zea mays
  TS8Cas2 target site (1)..(20)
gctcatcagtgatcagctgg

SEQ ID NO: 233 - DNA, 17 bp, Zea mays
  TS9Cas2 target site (1)..(17)
ggctgtttgcggcctcg

SEQ ID NO: 234 - DNA, 21 bp, Zea mays
  TS9Cas3 target site (1)..(21)
gcctcgaggttgcacgcacgt

SEQ ID NO: 235 - DNA, 20 bp, Zea mays
  TS10Cas1 target site (1)..(20)
gcctcgccttcgctagttaa

SEQ ID NO: 236 - DNA, 18 bp, Zea mays
  TS10Cas3 target site (1)..(18)
gctcgtgttggagataca

SEQ ID NO: 237 - DNA, 80 bp, Zea mays
gttaaatctgacgtgaatctgtttggaattgaaaaacaagtgcttcctttcatacaccactatgtcgcttcaatgtttgt

SEQ ID NO: 238 - DNA, 80 bp, Zea mays
acaaacattgaagcgacatagtggtgtatgaaaggaagcacttgtttttcaattccaaacagattcacgtcagatttaac

SEQ ID NO: 239 - DNA, 66 bp, Zea mays
ccagtactgcacgttacgtacgtacgaactaatatactccaccagctgatcactgatgagccgagc

SEQ ID NO: 240 - DNA, 66 bp, Zea mays
gctcggctcatcagtgatcagctggtggagtatattagttcgtacgtacgtaacgtgcagtactgg

SEQ ID NO: 241 - DNA, 35 bp, Zea mays
ccgacgtgcgtgcaacctcgaggccgcaaacagcc

SEQ ID NO: 242 - DNA, 35 bp, Zea mays
ggctgtttgcggcctcgaggttgcacgcacgtcgg

SEQ ID NO: 243 - DNA, 68 bp, Zea mays
gctcgtgttggagatacagggacagcaagtacttggcccttaactagcgaaggcgaggcggccatgga

SEQ ID NO: 244 - DNA, 68 bp, Zea mays
tccatggccgcctcgccttcgctagttaagggccaagtacttgctgtccctgtatctccaacacgagc

SEQ ID NO: 245 - DNA, 1108 bp, Artificial Sequence
  MHP14Cas-1 guideRNA cassette
tgagagtacaatgatgaacctagattaatcaatgccaaagtctgaaaaatgcaccctcagtctatgatccagaaaatcaagattgcttgaggccctgttcggttgttccggattagagccccggattaattcctagccggattacttctctaatttatatagattttgatgagctggaatgaatcctggcttattccggtacaaccgaacaggccctgaaggataccagtaatcgctgagctaaattggcatgctgtcagagtgtcagtattgcagcaaggtagtgagataaccggcatcatggtgccagtttgatggcaccattagggttagagatggtggccatgggcgcatgtcctggccaactttgtatgatatatggcagggtgaataggaaagtaaaattgtattgtaaaaagggatttcttctgtttgttagcgcatgtacaaggaatgcaagttttgagcgagggggcatcaaagatctggctgtgtttccagctgtttttgttagccccatcgaatccttgacataatgatcccgcttaaataagcaacctcgcttgtatagttccttgtgctctaacacacgatgatgataagtcgtaaaatagtggtgtccaaagaatttccaggcccagttgtaaaagctaaaatgctattcgaatttctactagcagtaagtcgtgtttagaaattatttttttatataccttttttccttctatgtacagtaggacacagtgtcagcgccgcgttgacggagaatatttgcaaaaaagtaaaagagaaagtcatagcggcgtatgtgccaaaaacttcgtcacagagagggccataagaaacatggcccacggcccaatacgaagcaccgcgacgaagcccaaacagcagtccgtaggtggagcaaagcgctgggtaatacgcaaacgttttgtcccaccttgactaatcacaagagtggagcgtaccttataaaccgagccgcaagcaccgaattgttaaatctgacgtgaatctgttgttttagagctagaaatagcaagttaaaataaggctagtccgttatcaacttgaaaaagtggcaccgagtcggtgcttttttttt

SEQ ID NO: 246 - DNA, 1106 bp, Artificial Sequence
  MHP14Cas-3 gRNA cassette
tgagagtacaatgatgaacctagattaatcaatgccaaagtctgaaaaatgcaccctcagtctatgatccagaaaatcaagattgcttgaggccctgttcggttgttccggattagagccccggattaattcctagccggattacttctctaatttatatagattttgatgagctggaatgaatcctggcttattccggtacaaccgaacaggccctgaaggataccagtaatcgctgagctaaattggcatgctgtcagagtgtcagtattgcagcaaggtagtgagataaccggcatcatggtgccagtttgatggcaccattagggttagagatggtggccatgggcgcatgtcctggccaactttgtatgatatatggcagggtgaataggaaagtaaaattgtattgtaaaaagggatttcttctgtttgttagcgcatgtacaaggaatgcaagttttgagcgagggggcatcaaagatctggctgtgtttccagctgtttttgttagccccatcgaatccttgacataatgatcccgcttaaataagcaacctcgcttgtatagttccttgtgctctaacacacgatgatgataagtcgtaaaatagtggtgtccaaagaatttccaggcccagttgtaaaagctaaaatgctattcgaatttctactagcagtaagtcgtgtttagaaattatttttttatataccttttttccttctatgtacagtaggacacagtgtcagcgccgcgttgacggagaatatttgcaaaaaagtaaaagagaaagtcatagcggcgtatgtgccaaaaacttcgtcacagagagggccataagaaacatggcccacggcccaatacgaagcaccgcgacgaagcccaaacagcagtccgtaggtggagcaaagcgctgggtaatacgcaaacgttttgtcccaccttgactaatcacaagagtggagcgtaccttataaaccgagccgcaagcaccgaattgcaaacattgaagcgacataggttttagagctagaaatagcaagttaaaataaggctagtccgttatcaacttgaaaaagtggcaccgagtcggtgcttttttttt

SEQ ID NO: 247 - DNA, 1103 bp, Artificial Sequence
  TS8Cas-1 guideRNA cassette
tgagagtacaatgatgaacctagattaatcaatgccaaagtctgaaaaatgcaccctcagtctatgatccagaaaatcaagattgcttgaggccctgttcggttgttccggattagagccccggattaattcctagccggattacttctctaatttatatagattttgatgagctggaatgaatcctggcttattccggtacaaccgaacaggccctgaaggataccagtaatcgctgagctaaattggcatgctgtcagagtgtcagtattgcagcaaggtagtgagataaccggcatcatggtgccagtttgatggcaccattagggttagagatggtggccatgggcgcatgtcctggccaactttgtatgatatatggcagggtgaataggaaagtaaaattgtattgtaaaaagggatttcttctgtttgttagcgcatgtacaaggaatgcaagttttgagcgagggggcatcaaagatctggctgtgtttccagctgtttttgttagccccatcgaatccttgacataatgatcccgcttaaataagcaacctcgcttgtatagttccttgtgctctaacacacgatgatgataagtcgtaaaatagtggtgtccaaagaatttccaggcccagttgtaaaagctaaaatgctattcgaatttctactagcagtaagtcgtgtttagaaattatttttttatataccttttttccttctatgtacagtaggacacagtgtcagcgccgcgttgacggagaatatttgcaaaaaagtaaaagagaaagtcatagcggcgtatgtgccaaaaacttcgtcacagagagggccataagaaacatggcccacggcccaatacgaagcaccgcgacgaagcccaaacagcagtccgtaggtggagcaaagcgctgggtaatacgcaaacgttttgtcccaccttgactaatcacaagagtggagcgtaccttataaaccgagccgcaagcaccgaattgtacgtaacgtgcagtacgttttagagctagaaatagcaagttaaaataaggctagtccgttatcaacttgaaaaagtggcaccgagtcggtgcttttttttt

SEQ ID NO: 248 - DNA, 1105 bp, Artificial Sequence
  TS8Cas-2 guideRNA cassette
tgagagtacaatgatgaacctagattaatcaatgccaaagtctgaaaaatgcaccctcagtctatgatccagaaaatcaagattgcttgaggccctgttcggttgttccggattagagccccggattaattcctagccggattacttctctaatttatatagattttgatgagctggaatgaatcctggcttattccggtacaaccgaacaggccctgaaggataccagtaatcgctgagctaaattggcatgctgtcagagtgtcagtattgcagcaaggtagtgagataaccggcatcatggtgccagtttgatggcaccattagggttagagatggtggccatgggcgcatgtcctggccaactttgtatgatatatggcagggtgaataggaaagtaaaattgtattgtaaaaagggatttcttctgtttgttagcgcatgtacaaggaatgcaagttttgagcgagggggcatcaaagatctggctgtgtttccagctgtttttgttagccccatcgaatccttgacataatgatcccgcttaaataagcaacctcgcttgtatagttccttgtgctctaacacacgatgatgataagtcgtaaaatagtggtgtccaaagaatttccaggcccagttgtaaaagctaaaatgctattcgaatttctactagcagtaagtcgtgtttagaaattatttttttatataccttttttccttctatgtacagtaggacacagtgtcagcgccgcgttgacggagaatatttgcaaaaaagtaaaagagaaagtcatagcggcgtatgtgccaaaaacttcgtcacagagagggccataagaaacatggcccacggcccaatacgaagcaccgcgacgaagcccaaacagcagtccgtaggtggagcaaagcgctgggtaatacgcaaacgttttgtcccaccttgactaatcacaagagtggagcgtaccttataaaccgagccgcaagcaccgaattgctcatcagtgatcagctgggttttagagctagaaatagcaagttaaaataaggctagtccgttatcaacttgaaaaagtggcaccgagtcggtgcttttttttt

SEQ ID NO: 249 - DNA, 1102 bp, Artificial Sequence
  TS9Cas-2 guideRNA cassette
tgagagtacaatgatgaacctagattaatcaatgccaaagtctgaaaaatgcaccctcagtctatgatccagaaaatcaagattgcttgaggccctgttcggttgttccggattagagccccggattaattcctagccggattacttctctaatttatatagattttgatgagctggaatgaatcctggcttattccggtacaaccgaacaggccctgaaggataccagtaatcgctgagctaaattggcatgctgtcagagtgtcagtattgcagcaaggtagtgagataaccggcatcatggtgccagtttgatggcaccattagggttagagatggtggccatgggcgcatgtcctggccaactttgtatgatatatggcagggtgaataggaaagtaaaattgtattgtaaaaagggatttcttctgtttgttagcgcatgtacaaggaatgcaagttttgagcgagggggcatcaaagatctggctgtgtttccagctgtttttgttagccccatcgaatccttgacataatgatcccgcttaaataagcaacctcgcttgtatagttccttgtgctctaacacacgatgatgataagtcgtaaaatagtggtgtccaaagaatttccaggcccagttgtaaaagctaaaatgctattcgaatttctactagcagtaagtcgtgtttagaaattatttttttatataccttttttccttctatgtacagtaggacacagtgtcagcgccgcgttgacggagaatatttgcaaaaaagtaaaagagaaagtcatagcggcgtatgtgccaaaaacttcgtcacagagagggccataagaaacatggcccacggcccaatacgaagcaccgcgacgaagcccaaacagcagtccgtaggtggagcaaagcgctgggtaatacgcaaacgttttgtcccaccttgactaatcacaagagtggagcgtaccttataaaccgagccgcaagcaccgaattggctgtttgcggcctcggttttagagctagaaatagcaagttaaaataaggctagtccgttatcaacttgaaaaagtggcaccgagtcggtgcttttttttt

SEQ ID NO: 250 - DNA, 1106 bp, Artificial Sequence
  TS9Cas-3 guideRNA cassette
tgagagtacaatgatgaacctagattaatcaatgccaaagtctgaaaaatgcaccctcagtctatgatccagaaaatcaagattgcttgaggccctgttcggttgttccggattagagccccggattaattcctagccggattacttctctaatttatatagattttgatgagctggaatgaatcctggcttattccggtacaaccgaacaggccctgaaggataccagtaatcgctgagctaaattggcatgctgtcagagtgtcagtattgcagcaaggtagtgagataaccggcatcatggtgccagtttgatggcaccattagggttagagatggtggccatgggcgcatgtcctggccaactttgtatgatatatggcagggtgaataggaaagtaaaattgtattgtaaaaagggatttcttctgtttgttagcgcatgtacaaggaatgcaagttttgagcgagggggcatcaaagatctggctgtgtttccagctgtttttgttagccccatcgaatccttgacataatgatcccgcttaaataagcaacctcgcttgtatagttccttgtgctctaacacacgatgatgataagtcgtaaaatagtggtgtccaaagaatttccaggcccagttgtaaaagctaaaatgctattcgaatttctactagcagtaagtcgtgtttagaaattatttttttatataccttttttccttctatgtacagtaggacacagtgtcagcgccgcgttgacggagaatatttgcaaaaaagtaaaagagaaagtcatagcggcgtatgtgccaaaaacttcgtcacagagagggccataagaaacatggcccacggcccaatacgaagcaccgcgacgaagcccaaacagcagtccgtaggtggagcaaagcgctgggtaatacgcaaacgttttgtcccaccttgactaatcacaagagtggagcgtaccttataaaccgagccgcaagcaccgaattgcctcgaggttgcacgcacgtgttttagagctagaaatagcaagttaaaataaggctagtccgttatcaacttgaaaaagtggcaccgagtcggtgcttttttttt

SEQ ID NO: 251 - DNA, 1105 bp, Artificial Sequence
  TS10Cas-1 guideRNA cassette
tgagagtacaatgatgaacctagattaatcaatgccaaagtctgaaaaatgcaccctcagtctatgatccagaaaatcaagattgcttgaggccctgttcggttgttccggattagagccccggattaattcctagccggattacttctctaatttatatagattttgatgagctggaatgaatcctggcttattccggtacaaccgaacaggccctgaaggataccagtaatcgctgagctaaattggcatgctgtcagagtgtcagtattgcagcaaggtagtgagataaccggcatcatggtgccagtttgatggcaccattagggttagagatggtggccatgggcgcatgtcctggccaactttgtatgatatatggcagggtgaataggaaagtaaaattgtattgtaaaaagggatttcttctgtttgttagcgcatgtacaaggaatgcaagttttgagcgagggggcatcaaagatctggctgtgtttccagctgtttttgttagccccatcgaatccttgacataatgatcccgcttaaataagcaacctcgcttgtatagttccttgtgctctaacacacgatgatgataagtcgtaaaatagtggtgtccaaagaatttccaggcccagttgtaaaagctaaaatgctattcgaatttctactagcagtaagtcgtgtttagaaattatttttttatataccttttttccttctatgtacagtaggacacagtgtcagcgccgcgttgacggagaatatttgcaaaaaagtaaaagagaaagtcatagcggcgtatgtgccaaaaacttcgtcacagagagggccataagaaacatggcccacggcccaatacgaagcaccgcgacgaagcccaaacagcagtccgtaggtggagcaaagcgctgggtaatacgcaaacgttttgtcccaccttgactaatcacaagagtggagcgtaccttataaaccgagccgcaagcaccgaattgcctcgccttcgctagttaagttttagagctagaaatagcaagttaaaataaggctagtccgttatcaacttgaaaaagtggcaccgagtcggtgcttttttttt

SEQ ID NO: 252 - DNA, 1103 bp, Artificial Sequence
  TSCas-3 guideRNA cassette
tgagagtacaatgatgaacctagattaatcaatgccaaagtctgaaaaatgcaccctcagtctatgatccagaaaatcaagattgcttgaggccctgttcggttgttccggattagagccccggattaattcctagccggattacttctctaatttatatagattttgatgagctggaatgaatcctggcttattccggtacaaccgaacaggccctgaaggataccagtaatcgctgagctaaattggcatgctgtcagagtgtcagtattgcagcaaggtagtgagataaccggcatcatggtgccagtttgatggcaccattagggttagagatggtggccatgggcgcatgtcctggccaactttgtatgatatatggcagggtgaataggaaagtaaaattgtattgtaaaaagggatttcttctgtttgttagcgcatgtacaaggaatgcaagttttgagcgagggggcatcaaagatctggctgtgtttccagctgtttttgttagccccatcgaatccttgacataatgatcccgcttaaataagcaacctcgcttgtatagttccttgtgctctaacacacgatgatgataagtcgtaaaatagtggtgtccaaagaatttccaggcccagttgtaaaagctaaaatgctattcgaatttctactagcagtaagtcgtgtttagaaattatttttttatataccttttttccttctatgtacagtaggacacagtgtcagcgccgcgttgacggagaatatttgcaaaaaagtaaaagagaaagtcatagcggcgtatgtgccaaaaacttcgtcacagagagggccataagaaacatggcccacggcccaatacgaagcaccgcgacgaagcccaaacagcagtccgtaggtggagcaaagcgctgggtaatacgcaaacgttttgtcccaccttgactaatcacaagagtggagcgtaccttataaaccgagccgcaagcaccgaattgctcgtgttggagatacagttttagagctagaaatagcaagttaaaataaggctagtccgttatcaacttgaaaaagtggcaccgagtcggtgcttttttttt

SEQ ID NO: 253 - DNA, 4928 bp, Artificial Sequence
  MHP14Cas1 donor
gccatgtcatcttgtagttagggcttggagctagtcgaccgttggaggctttgtcctcatgcggcaccggacagtctggtgctacaccggacagtccggtgcccctctgaccatctgctctgacatctgaattgcactgttcactttgcagagtcgaccattgcgtgcaggtagccattgctccgctggtgcaccggacagtccagtggcacaccggacagtccgatgaattatagcggagctgcgcctgggaaacccgaagctgaggagtttgagctgattcaccctggtgcaccggacactgtccggtggcacactggacagtccggtgcgccggaccagggcacacttcggtttcctttttgctcctttcttttgaagcctaacttgttcttttgattggtttgtgttgaacctttagcacctgtagaatgtatgatctagagcaaactagttagtccaattatttgtgttgggcaattcaaccaccaaaaacatttaggaaaatgtttgatcttatttccctttcatattctcttattgctagttgtcggggtgaagttgagctcttgcttaggttttaattagtgttgatttttagaaaaacccaattcacccccctcttgggcatcgtgatccttttagcaacaaaatgtgcacacatcaaaacaagcgcttctaccatatgtagttgttgcacaataatggtcctccttaggatttgcaaccgtttaacaatagctatgtgaccacagatttatgtcggatgcacgaaaattgtaggattttacatttctttaccttggttcacaaacattgaagcgacatagtggtgtatgaaaggaagcacttgtttttcaattccaaaccgcggtaccatttaaatcttaagcctaggataacttcgtatagcatacattatacgaagttatggcgccgctagcctgcagtgcagcgtgacccggtcgtgcccctctctagagataatgagcattgcatgtctaagttataaaaaattaccacatattttttttgtcacacttgtttgaagtgcagtttatctatctttatacatatatttaaactttactctacgaataatataatctatagtactacaataatatcagtgttttagagaatcatataaatgaacagttagacatggtctaaaggacaattgagtattttgacaacaggactctacagttttatctttttagtgtgcatgtgttctcctttttttttgcaaatagcttcacctatataatacttcatccattttattagtacatccatttagggtttagggttaatggtttttatagactaatttttttagtacatctattttattctattttagcctctaaattaagaaaactaaaactctattttagtttttttatttaataatttagatataaaatagaataaaataaagtgactaaaaattaaacaaataccctttaagaaattaaaaaaactaaggaaacatttttcttgtttcgagtagataatgccagcctgttaaacgccgtcgacgagtctaacggacaccaaccagcgaaccagcagcgtcgcgtcgggccaagcgaagcagacggcacggcatctctgtcgctgcctctggacccctctcgagagttccgctccaccgttggacttgctccgctgtcggcatccagaaattgcgtggcggagcggcagacgtgagccggcacggcaggcggcctcctcctcctctcacggcaccggcagctacgggggattcctttcccaccgctccttcgctttcccttcctcgcccgccgtaataaatagacaccccctccacaccctctttccccaacctcgtgttgttcggagcgcacacacacacaaccagatctcccccaaatccacccgtcggcacctccgcttcaaggtacgccgctcgtcctcccccccccccctctctaccttctctagatcggcgttccggtccatgcatggttagggcccggtagttctacttctgttcatgtttgtgttagatccgtgtttgtgttagatccgtgctgctagcgttcgtacacggatgcgacctgtacgtcagacacgttctgattgctaacttgccagtgtttctctttggggaatcctgggatggctctagccgttccgcagacgggatcgatttcatgattttttttgtttcgttgcatagggtttggtttgcccttttcctttatttcaatatatgccgtgcacttgtttgtcgggtcatcttttcatgcttttttttgtcttggttgtgatgatgtggtctggttgggcggtcgttctagatcggagtagaattctgtttcaaactacctggtggatttattaattttggatctgtatgtgtgtgccatacatattcatagttacgaattgaagatgatggatggaaatatcgatctaggataggtatacatgttgatgcgggttttactgatgcatatacagagatgctttttgttcgcttggttgtgatgatgtggtgtggttgggcggtcgttcattcgttctagatcggagtagaatactgtttcaaactacctggtgtatttattaattttggaactgtatgtgtgtgtcatacatcttcatagttacgagtttaagatggatggaaatatcgatctaggataggtatacatgttgatgtgggttttactgatgcatatacatgatggcatatgcagcatctattcatatgctctaaccttgagtacctatctattataataaacaagtatgttttataattattttgatcttgatatacttggatgatggcatatgcagcagctatatgtggatttttttagccctgccttcatacgctatttatttgcttggtactgtttcttttgtcgatgctcaccctgttgtttggtgttacttctgcaggtcgactctagaggatcaattcgctagcgaagttcctattccgaagttcctattctctagaaagtataggaacttcagatccaccgggatccccgatcatgcaaaaactcattaactcagtgcaaaactatgcctggggcagcaaaacggcgttgactgaactttatggtatggaaaatccgtccagccagccgatggccgagctgtggatgggcgcacatccgaaaagcagttcacgagtgcagaatgccgccggagatatcgtttcactgcgtgatgtgattgagagtgataaatcgactctgctcggagaggccgttgccaaacgctttggcgaactgcctttcctgttcaaagtattatgcgcagcacagccactctccattcaggttcatccaaacaaacacaattctgaaatcggttttgccaaagaaaatgccgcaggtatcccgatggatgccgccgagcgtaactataaagatcctaaccacaagccggagctggtttttgcgctgacgcctttccttgcgatgaacgcgtttcgtgaattttccgagattgtctccctactccagccggtcgcaggtgcacatccggcgattgctcactttttacaacagcctgatgccgaacgtttaagcgaactgttcgccagcctgttgaatatgcagggtgaagaaaaatcccgcgcgctggcgattttaaaatcggccctcgatagccagcagggtgaaccgtggcaaacgattcgtttaatttctgaattttacccggaagacagcggtctgttctccccgctattgctgaatgtggtgaaattgaaccctggcgaagcgatgttcctgttcgctgaaacaccgcacgcttacctgcaaggcgtggcgctggaagtgatggcaaactccgataacgtgctgcgtgcgggtctgacgcctaaatacattgatattccggaactggttgccaatgtgaaattcgaagccaaaccggctaaccagttgttgacccagccggtgaaacaaggtgcagaactggacttcccgattccagtggatgattttgccttctcgctgcatgaccttagtgataaagaaaccaccattagccagcagagtgccgccattttgttctgcgtcgaaggcgatgcaacgttgtggaaaggttctcagcagttacagcttaaaccgggtgaatcagcgtttattgccgccaacgaatcaccggtgactgtcaaaggccacggccgtttagcgcgtgtttacaacaagctgtaagagcttactgaaaaaattaacatctcttgctaagctgggggtggaacctagacttgtccatcttctggattggccaacttaattaatgtatgaaataaaaggatgcacacatagtgacatgctaatcactataatgtgggcatcaaagttgtgtgttatgtgtaattactagttatctgaataaaagagaaagagatcatccatatttcttatcctaaatgaatgtcacgtgtctttataattctttgatgaaccagatgcatttcattaaccaaatccatatacatataaatattaatcatatataattaatatcaattgggttagcaaaacaaatctagtctaggtgtgttttgcgaatgcggccctagcgtatacgaagttcctattccgaagttcctattctccagaaagtataggaacttctgtacacctgagctgattccgatgacttcgtaggttcctagctcaagccgctcgtgtccaagcgtcacttacgattagctaatgattacggcatctaggaccgactagctaactaactagtaccgaggccggccccgcgggagctcggcgcgccagattcacgtcagatttaaccaaaactatattatgaggtacacatattacaatccaaaatgaattatctagttctcgagttgtacacagtttatcacgtgttttacacattccaaccctaaactccaaccgtgg

SEQ ID NO: 254 - DNA, 4570 bp, Artificial Sequence
  MHP14Cas3 donor
acacttcggtttcctttttgctcctttcttttgaagcctaacttgttcttttgattggtttgtgttgaacctttagcacctgtagaatgtatgatctagagcaaactagttagtccaattatttgtgttgggcaattcaaccaccaaaaacatttaggaaaatgtttgatcttatttccctttcatattctcttattgctagttgtcggggtgaagttgagctcttgcttaggttttaattagtgttgatttttagaaaaacccaattcacccccctcttgggcatcgtgatccttttagcaacaaaatgtgcacacatcaaaacaagcgcttctaccatatgtagttgttgcacaataatggtcctccttaggatttgcaaccgtttaacaatagctatgtgaccacagatttatgtcggatgcacgaaaattgtaggattttacatttctttaccttggttcacaaacattgaagcgacaggtaccatttaaatcttaagcctaggataacttcgtatagcatacattatacgaagttatggcgccgctagcctgcagtgcagcgtgacccggtcgtgcccctctctagagataatgagcattgcatgtctaagttataaaaaattaccacatattttttttgtcacacttgtttgaagtgcagtttatctatctttatacatatatttaaactttactctacgaataatataatctatagtactacaataatatcagtgttttagagaatcatataaatgaacagttagacatggtctaaaggacaattgagtattttgacaacaggactctacagttttatctttttagtgtgcatgtgttctcctttttttttgcaaatagcttcacctatataatacttcatccattttattagtacatccatttagggtttagggttaatggtttttatagactaatttttttagtacatctattttattctattttagcctctaaattaagaaaactaaaactctattttagtttttttatttaataatttagatataaaatagaataaaataaagtgactaaaaattaaacaaataccctttaagaaattaaaaaaactaaggaaacatttttcttgtttcgagtagataatgccagcctgttaaacgccgtcgacgagtctaacggacaccaaccagcgaaccagcagcgtcgcgtcgggccaagcgaagcagacggcacggcatctctgtcgctgcctctggacccctctcgagagttccgctccaccgttggacttgctccgctgtcggcatccagaaattgcgtggcggagcggcagacgtgagccggcacggcaggcggcctcctcctcctctcacggcaccggcagctacgggggattcctttcccaccgctccttcgctttcccttcctcgcccgccgtaataaatagacaccccctccacaccctctttccccaacctcgtgttgttcggagcgcacacacacacaaccagatctcccccaaatccacccgtcggcacctccgcttcaaggtacgccgctcgtcctcccccccccccctctctaccttctctagatcggcgttccggtccatgcatggttagggcccggtagttctacttctgttcatgtttgtgttagatccgtgtttgtgttagatccgtgctgctagcgttcgtacacggatgcgacctgtacgtcagacacgttctgattgctaacttgccagtgtttctctttggggaatcctgggatggctctagccgttccgcagacgggatcgatttcatgattttttttgtttcgttgcatagggtttggtttgcccttttcctttatttcaatatatgccgtgcacttgtttgtcgggtcatcttttcatgcttttttttgtcttggttgtgatgatgtggtctggttgggcggtcgttctagatcggagtagaattctgtttcaaactacctggtggatttattaattttggatctgtatgtgtgtgccatacatattcatagttacgaattgaagatgatggatggaaatatcgatctaggataggtatacatgttgatgcgggttttactgatgcatatacagagatgctttttgttcgcttggttgtgatgatgtggtgtggttgggcggtcgttcattcgttctagatcggagtagaatactgtttcaaactacctggtgtatttattaattttggaactgtatgtgtgtgtcatacatcttcatagttacgagtttaagatggatggaaatatcgatctaggataggtatacatgttgatgtgggttttactgatgcatatacatgatggcatatgcagcatctattcatatgctctaaccttgagtacctatctattataataaacaagtatgttttataattattttgatcttgatatacttggatgatggcatatgcagcagctatatgtggatttttttagccctgccttcatacgctatttatttgcttggtactgtttcttttgtcgatgctcaccctgttgtttggtgttacttctgcaggtcgactctagaggatcaattcgctagcgaagttcctattccgaagttcctattctctagaaagtataggaacttcagatccaccgggatccccgatcatgcaaaaactcattaactcagtgcaaaactatgcctggggcagcaaaacggcgttgactgaactttatggtatggaaaatccgtccagccagccgatggccgagctgtggatgggcgcacatccgaaaagcagttcacgagtgcagaatgccgccggagatatcgtttcactgcgtgatgtgattgagagtgataaatcgactctgctcggagaggccgttgccaaacgctttggcgaactgcctttcctgttcaaagtattatgcgcagcacagccactctccattcaggttcatccaaacaaacacaattctgaaatcggttttgccaaagaaaatgccgcaggtatcccgatggatgccgccgagcgtaactataaagatcctaaccacaagccggagctggtttttgcgctgacgcctttccttgcgatgaacgcgtttcgtgaattttccgagattgtctccctactccagccggtcgcaggtgcacatccggcgattgctcactttttacaacagcctgatgccgaacgtttaagcgaactgttcgccagcctgttgaatatgcagggtgaagaaaaatcccgcgcgctggcgattttaaaatcggccctcgatagccagcagggtgaaccgtggcaaacgattcgtttaatttctgaattttacccggaagacagcggtctgttctccccgctattgctgaatgtggtgaaattgaaccctggcgaagcgatgttcctgttcgctgaaacaccgcacgcttacctgcaaggcgtggcgctggaagtgatggcaaactccgataacgtgctgcgtgcgggtctgacgcctaaatacattgatattccggaactggttgccaatgtgaaattcgaagccaaaccggctaaccagttgttgacccagccggtgaaacaaggtgcagaactggacttcccgattccagtggatgattttgccttctcgctgcatgaccttagtgataaagaaaccaccattagccagcagagtgccgccattttgttctgcgtcgaaggcgatgcaacgttgtggaaaggttctcagcagttacagcttaaaccgggtgaatcagcgtttattgccgccaacgaatcaccggtgactgtcaaaggccacggccgtttagcgcgtgtttacaacaagctgtaagagcttactgaaaaaattaacatctcttgctaagctgggggtggaacctagacttgtccatcttctggattggccaacttaattaatgtatgaaataaaaggatgcacacatagtgacatgctaatcactataatgtgggcatcaaagttgtgtgttatgtgtaattactagttatctgaataaaagagaaagagatcatccatatttcttatcctaaatgaatgtcacgtgtctttataattctttgatgaaccagatgcatttcattaaccaaatccatatacatataaatattaatcatatataattaatatcaattgggttagcaaaacaaatctagtctaggtgtgttttgcgaatgcggccctagcgtatacgaagttcctattccgaagttcctattctccagaaagtataggaacttctgtacacctgagctgattccgatgacttcgtaggttcctagctcaagccgctcgtgtccaagcgtcacttacgattagctaatgattacggcatctaggaccgactagctaactaactagtaccgaggccggccccgcgggagctcggcgcgcctagtggtgtatgaaaggaagcacttgtttttcaattccaaacagattcacgtcagatttaaccaaaactatattatgaggtacacatattacaatccaaaatgaattatctagttctcgagttgtacacagtttatcacgtgttttacacattccaaccctaaact

SEQ ID NO: 255 - DNA, 5091 bp, Artificial Sequence
  TS8Cas-1 donor
cacacatgactgcctgagaatctgctgccgttgcctctcatattatattcgatcccctgactaaaaaaactcggggccggctaatacgtactgtacgtacgcagaatttacggtccagcacgggcatgccgcgcgggctgactttgctccactgactcgatcatgtgcggattccatcgcggcgtagcgtagccaaccgcaacgcaaaccgacttcatcttttttttttattatgaacaaaaggagatcgagagaaacgtgaacggtaaataatatatctgatcccatgcatgcacgctgcctgggtcgatctcgctctcgctccgcccagacgaacatgcatgctggtcaggctcaacgctcaggcgggcaagctgtgggaggacatgggatgggagaggaggacacatgcatgctggccagtcaggcactgtgctggcacatgaggtagggataggggggccctcggccagtgtccaggccgcatgcatgcatgccccccctgctgctcgaccgaacaacgttggatgcctggattgatgcaacagtttggacggacggaccatacgttatgtaccagtaggtaccatttaaatcttaagcctaggataacttcgtatagcatacattatacgaagttatggcgccgctagcctgcagtgcagcgtgacccggtcgtgcccctctctagagataatgagcattgcatgtctaagttataaaaaattaccacatattttttttgtcacacttgtttgaagtgcagtttatctatctttatacatatatttaaactttactctacgaataatataatctatagtactacaataatatcagtgttttagagaatcatataaatgaacagttagacatggtctaaaggacaattgagtattttgacaacaggactctacagttttatctttttagtgtgcatgtgttctcctttttttttgcaaatagcttcacctatataatacttcatccattttattagtacatccatttagggtttagggttaatggtttttatagactaatttttttagtacatctattttattctattttagcctctaaattaagaaaactaaaactctattttagtttttttatttaataatttagatataaaatagaataaaataaagtgactaaaaattaaacaaataccctttaagaaattaaaaaaactaaggaaacatttttcttgtttcgagtagataatgccagcctgttaaacgccgtcgacgagtctaacggacaccaaccagcgaaccagcagcgtcgcgtcgggccaagcgaagcagacggcacggcatctctgtcgctgcctctggacccctctcgagagttccgctccaccgttggacttgctccgctgtcggcatccagaaattgcgtggcggagcggcagacgtgagccggcacggcaggcggcctcctcctcctctcacggcaccggcagctacgggggattcctttcccaccgctccttcgctttcccttcctcgcccgccgtaataaatagacaccccctccacaccctctttccccaacctcgtgttgttcggagcgcacacacacacaaccagatctcccccaaatccacccgtcggcacctccgcttcaaggtacgccgctcgtcctcccccccccccctctctaccttctctagatcggcgttccggtccatgcatggttagggcccggtagttctacttctgttcatgtttgtgttagatccgtgtttgtgttagatccgtgctgctagcgttcgtacacggatgcgacctgtacgtcagacacgttctgattgctaacttgccagtgtttctctttggggaatcctgggatggctctagccgttccgcagacgggatcgatttcatgattttttttgtttcgttgcatagggtttggtttgcccttttcctttatttcaatatatgccgtgcacttgtttgtcgggtcatcttttcatgcttttttttgtcttggttgtgatgatgtggtctggttgggcggtcgttctagatcggagtagaattctgtttcaaactacctggtggatttattaattttggatctgtatgtgtgtgccatacatattcatagttacgaattgaagatgatggatggaaatatcgatctaggataggtatacatgttgatgcgggttttactgatgcatatacagagatgctttttgttcgcttggttgtgatgatgtggtgtggttgggcggtcgttcattcgttctagatcggagtagaatactgtttcaaactacctggtgtatttattaattttggaactgtatgtgtgtgtcatacatcttcatagttacgagtttaagatggatggaaatatcgatctaggataggtatacatgttgatgtgggttttactgatgcatatacatgatggcatatgcagcatctattcatatgctctaaccttgagtacctatctattataataaacaagtatgttttataattattttgatcttgatatacttggatgatggcatatgcagcagctatatgtggatttttttagccctgccttcatacgctatttatttgcttggtactgtttcttttgtcgatgctcaccctgttgtttggtgttacttctgcaggtcgactctagaggatcaattcgctagcgaagttcctattccgaagttcctattctctagaaagtataggaacttcagatccaccgggatccccgatcatgcaaaaactcattaactcagtgcaaaactatgcctggggcagcaaaacggcgttgactgaactttatggtatggaaaatccgtccagccagccgatggccgagctgtggatgggcgcacatccgaaaagcagttcacgagtgcagaatgccgccggagatatcgtttcactgcgtgatgtgattgagagtgataaatcgactctgctcggagaggccgttgccaaacgctttggcgaactgcctttcctgttcaaagtattatgcgcagcacagccactctccattcaggttcatccaaacaaacacaattctgaaatcggttttgccaaagaaaatgccgcaggtatcccgatggatgccgccgagcgtaactataaagatcctaaccacaagccggagctggtttttgcgctgacgcctttccttgcgatgaacgcgtttcgtgaattttccgagattgtctccctactccagccggtcgcaggtgcacatccggcgattgctcactttttacaacagcctgatgccgaacgtttaagcgaactgttcgccagcctgttgaatatgcagggtgaagaaaaatcccgcgcgctggcgattttaaaatcggccctcgatagccagcagggtgaaccgtggcaaacgattcgtttaatttctgaattttacccggaagacagcggtctgttctccccgctattgctgaatgtggtgaaattgaaccctggcgaagcgatgttcctgttcgctgaaacaccgcacgcttacctgcaaggcgtggcgctggaagtgatggcaaactccgataacgtgctgcgtgcgggtctgacgcctaaatacattgatattccggaactggttgccaatgtgaaattcgaagccaaaccggctaaccagttgttgacccagccggtgaaacaaggtgcagaactggacttcccgattccagtggatgattttgccttctcgctgcatgaccttagtgataaagaaaccaccattagccagcagagtgccgccattttgttctgcgtcgaaggcgatgcaacgttgtggaaaggttctcagcagttacagcttaaaccgggtgaatcagcgtttattgccgccaacgaatcaccggtgactgtcaaaggccacggccgtttagcgcgtgtttacaacaagctgtaagagcttactgaaaaaattaacatctcttgctaagctgggggtggaacctagacttgtccatcttctggattggccaacttaattaatgtatgaaataaaaggatgcacacatagtgacatgctaatcactataatgtgggcatcaaagttgtgtgttatgtgtaattactagttatctgaataaaagagaaagagatcatccatatttcttatcctaaatgaatgtcacgtgtctttataattctttgatgaaccagatgcatttcattaaccaaatccatatacatataaatattaatcatatataattaatatcaattgggttagcaaaacaaatctagtctaggtgtgttttgcgaatgcggccctagcgtatacgaagttcctattccgaagttcctattctccagaaagtataggaacttctgtacacctgagctgattccgatgacttcgtaggttcctagctcaagccgctcgtgtccaagcgtcacttacgattagctaatgattacggcatctaggaccgactagctaactaactagtaccgaggccggccccgcggactgcacgttacgtacgtacgaactaatatactccaccagctgatcactgatgagccgagccgccatgcattgtaatttataacatgtgcggctgtacgcttccatctcaaatacctttttatatatatattgtactttatagtctacgacataatctgccatggtaatttataagatgtgctttattgctcgttgttctgttctcatctgtgtccatggcatggcatggatacaaaatgtatgtatggccacgcatccaatctgtgacgttgtcaaggcagaggtccaaccgtccaagaccctcttgtgccgccctgtacttgcagtcagtgacgttgtgagaaaaagctgtgggtggtctccgcagagcgcgcgggccacgagagggagccccatctctcggccgaggggtacgggggctccagacacggtcctttggtttcttctgcctgtagcgagcggccccgccccccaccgcgctgctagcctagccgatgctgatccatccaccacccacaagggattgttccacgacttgtggacctgaccatgacgtgacttcacgccatgtacgctcagccgctcactagcttttttttc

SEQ ID NO: 256 - DNA, 5237 bp, Artificial Sequence
  TS8Cas-2 donor
tctctttcagggcttgttcgtttacgttggattgcacccggaatcgttacagctaatcaaagtttatataaattagagaagcaaccggataggaatcgttccgacccaccaattcgacacaaacgaacaaggcctcaatccttctcaatccacctccaacccaataagctcttggaggcggcggcgggagagcagccacacacatgactgcctgagaatctgctgccgttgcctctcatattatattcgatcccctgactaaaaaaactcggggccggctaatacgtactgtacgtacgcagaatttacggtccagcacgggcatgccgcgcgggctgactttgctccactgactcgatcatgtgcggattccatcgcggcgtagcgtagccaaccgcaacgcaaaccgacttcatcttttttttttattatgaacaaaaggagatcgagagaaacgtgaacggtaaataatatatctgatcccatgcatgcacgctgcctgggtcgatctcgctctcgctccgcccagacgaacatgcatgctggtcaggctcaacgctcaggcgggcaagctgtgggaggacatgggatgggagaggaggacacatgcatgctggccagtcaggcactgtgctggcacatgaggtagggataggggggccctcggccagtgtccaggccgcatgcatgcatgccccccctgctgctcgaccgaacaacgttggatgcctggattgatgcaacagtttggacggacggaccatacgttatgtaccagtactgcacgttacgtacgtacgaactaatatactccaccaggtaccatttaaatcttaagcctaggataacttcgtatagcatacattatacgaagttatggcgccgctagcctgcagtgcagcgtgacccggtcgtgcccctctctagagataatgagcattgcatgtctaagttataaaaaattaccacatattttttttgtcacacttgtttgaagtgcagtttatctatctttatacatatatttaaactttactctacgaataatataatctatagtactacaataatatcagtgttttagagaatcatataaatgaacagttagacatggtctaaaggacaattgagtattttgacaacaggactctacagttttatctttttagtgtgcatgtgttctcctttttttttgcaaatagcttcacctatataatacttcatccattttattagtacatccatttagggtttagggttaatggtttttatagactaatttttttagtacatctattttattctattttagcctctaaattaagaaaactaaaactctattttagtttttttatttaataatttagatataaaatagaataaaataaagtgactaaaaattaaacaaataccctttaagaaattaaaaaaactaaggaaacatttttcttgtttcgagtagataatgccagcctgttaaacgccgtcgacgagtctaacggacaccaaccagcgaaccagcagcgtcgcgtcgggccaagcgaagcagacggcacggcatctctgtcgctgcctctggacccctctcgagagttccgctccaccgttggacttgctccgctgtcggcatccagaaattgcgtggcggagcggcagacgtgagccggcacggcaggcggcctcctcctcctctcacggcaccggcagctacgggggattcctttcccaccgctccttcgctttcccttcctcgcccgccgtaataaatagacaccccctccacaccctctttccccaacctcgtgttgttcggagcgcacacacacacaaccagatctcccccaaatccacccgtcggcacctccgcttcaaggtacgccgctcgtcctcccccccccccctctctaccttctctagatcggcgttccggtccatgcatggttagggcccggtagttctacttctgttcatgtttgtgttagatccgtgtttgtgttagatccgtgctgctagcgttcgtacacggatgcgacctgtacgtcagacacgttctgattgctaacttgccagtgtttctctttggggaatcctgggatggctctagccgttccgcagacgggatcgatttcatgattttttttgtttcgttgcatagggtttggtttgcccttttcctttatttcaatatatgccgtgcacttgtttgtcgggtcatcttttcatgcttttttttgtcttggttgtgatgatgtggtctggttgggcggtcgttctagatcggagtagaattctgtttcaaactacctggtggatttattaattttggatctgtatgtgtgtgccatacatattcatagttacgaattgaagatgatggatggaaatatcgatctaggataggtatacatgttgatgcgggttttactgatgcatatacagagatgctttttgttcgcttggttgtgatgatgtggtgtggttgggcggtcgttcattcgttctagatcggagtagaatactgtttcaaactacctggtgtatttattaattttggaactgtatgtgtgtgtcatacatcttcatagttacgagtttaagatggatggaaatatcgatctaggataggtatacatgttgatgtgggttttactgatgcatatacatgatggcatatgcagcatctattcatatgctctaaccttgagtacctatctattataataaacaagtatgttttataattattttgatcttgatatacttggatgatggcatatgcagcagctatatgtggatttttttagccctgccttcatacgctatttatttgcttggtactgtttcttttgtcgatgctcaccctgttgtttggtgttacttctgcaggtcgactctagaggatcaattcgctagcgaagttcctattccgaagttcctattctctagaaagtataggaacttcagatccaccgggatccccgatcatgcaaaaactcattaactcagtgcaaaactatgcctggggcagcaaaacggcgttgactgaactttatggtatggaaaatccgtccagccagccgatggccgagctgtggatgggcgcacatccgaaaagcagttcacgagtgcagaatgccgccggagatatcgtttcactgcgtgatgtgattgagagtgataaatcgactctgctcggagaggccgttgccaaacgctttggcgaactgcctttcctgttcaaagtattatgcgcagcacagccactctccattcaggttcatccaaacaaacacaattctgaaatcggttttgccaaagaaaatgccgcaggtatcccgatggatgccgccgagcgtaactataaagatcctaaccacaagccggagctggtttttgcgctgacgcctttccttgcgatgaacgcgtttcgtgaattttccgagattgtctccctactccagccggtcgcaggtgcacatccggcgattgctcactttttacaacagcctgatgccgaacgtttaagcgaactgttcgccagcctgttgaatatgcagggtgaagaaaaatcccgcgcgctggcgattttaaaatcggccctcgatagccagcagggtgaaccgtggcaaacgattcgtttaatttctgaattttacccggaagacagcggtctgttctccccgctattgctgaatgtggtgaaattgaaccctggcgaagcgatgttcctgttcgctgaaacaccgcacgcttacctgcaaggcgtggcgctggaagtgatggcaaactccgataacgtgctgcgtgcgggtctgacgcctaaatacattgatattccggaactggttgccaatgtgaaattcgaagccaaaccggctaaccagttgttgacccagccggtgaaacaaggtgcagaactggacttcccgattccagtggatgattttgccttctcgctgcatgaccttagtgataaagaaaccaccattagccagcagagtgccgccattttgttctgcgtcgaaggcgatgcaacgttgtggaaaggttctcagcagttacagcttaaaccgggtgaatcagcgtttattgccgccaacgaatcaccggtgactgtcaaaggccacggccgtttagcgcgtgtttacaacaagctgtaagagcttactgaaaaaattaacatctcttgctaagctgggggtggaacctagacttgtccatcttctggattggccaacttaattaatgtatgaaataaaaggatgcacacatagtgacatgctaatcactataatgtgggcatcaaagttgtgtgttatgtgtaattactagttatctgaataaaagagaaagagatcatccatatttcttatcctaaatgaatgtcacgtgtctttataattctttgatgaaccagatgcatttcattaaccaaatccatatacatataaatattaatcatatataattaatatcaattgggttagcaaaacaaatctagtctaggtgtgttttgcgaatgcggccctagcgtatacgaagttcctattccgaagttcctattctccagaaagtataggaacttctgtacacctgagctgattccgatgacttcgtaggttcctagctcaagccgctcgtgtccaagcgtcacttacgattagctaatgattacggcatctaggaccgactagctaactaactagtaccgaggccggccccgcgggagctcgctgatcactgatgagccgagccgccatgcattgtaatttataacatgtgcggctgtacgcttccatctcaaatacctttttatatatatattgtactttatagtctacgacataatctgccatggtaatttataagatgtgctttattgctcgttgttctgttctcatctgtgtccatggcatggcatggatacaaaatgtatgtatggccacgcatccaatctgtgacgttgtcaaggcagaggtccaaccgtccaagaccctcttgtgccgccctgtacttgcagtcagtgacgttgtgagaaaaagctgtgggtggtctccgcagagcgcgcgggccacgagagggagccccatctctcggccgaggggtacgggggctccagacacggtcctttggtttcttctgcctgtagcgagcggccccgccccccaccgcgctgctagcctagccgatgctgatccatccaccacccacaagggattgttccacgacttgtggac

SEQ ID NO: 257 - DNA, 5427 bp, Artificial Sequence
  TS9Cas-2 donor
agcaaggaactaaactgttattggacgctaaagtttagtactttatctttaacatctttcagcatttctatgtagatatttaagggctaaattttagcaagtgtgctgataaattttagcctaaatgtttctgttgggctaaattttagcaagtgtactgttaaattttagcatattccttttagagtggtatgggtgtgcatagactaaatgtttccgttgggccctaatttaacgatgtgtacgcaggcctgtttagatgacttggtaccggcatatggcctcgtactgtttcatttgatgacgcgagcgtgcggcccatgcagcagcagcacgccgggaaggcagcggattttgaagtactattggacagcgcggcgcggggaccgggtcgttggcgcgcggtggagtgggggtgggtggtcctggcgtcctgccctgcgcgatggtcgatggatgccccatgcgcgtgtaaccgcccagccgtcgccatccgaccaggtgggcagacgtacgtacggtggcacgcccacggcccatcggccatcgcgatcgcgttcgtatcgtgtcctcaataacgaaagcgccaacggaaggcgctgtcgtcgtcagttcaccgcgcgccggcgccctgtgtcctcgtccctctcgacttctcgaccagtaagaactctcgcgagctgcggagctgctggcgatggccggccggtgggatccgacgtgcgtgcaacctcgaatttaaatcttaagcctaggataacttcgtatagcatacattatacgaagttatggcgccgctagcctgcagtgcagcgtgacccggtcgtgcccctctctagagataatgagcattgcatgtctaagttataaaaaattaccacatattttttttgtcacacttgtttgaagtgcagtttatctatctttatacatatatttaaactttactctacgaataatataatctatagtactacaataatatcagtgttttagagaatcatataaatgaacagttagacatggtctaaaggacaattgagtattttgacaacaggactctacagttttatctttttagtgtgcatgtgttctcctttttttttgcaaatagcttcacctatataatacttcatccattttattagtacatccatttagggtttagggttaatggtttttatagactaatttttttagtacatctattttattctattttagcctctaaattaagaaaactaaaactctattttagtttttttatttaataatttagatataaaatagaataaaataaagtgactaaaaattaaacaaataccctttaagaaattaaaaaaactaaggaaacatttttcttgtttcgagtagataatgccagcctgttaaacgccgtcgacgagtctaacggacaccaaccagcgaaccagcagcgtcgcgtcgggccaagcgaagcagacggcacggcatctctgtcgctgcctctggacccctctcgagagttccgctccaccgttggacttgctccgctgtcggcatccagaaattgcgtggcggagcggcagacgtgagccggcacggcaggcggcctcctcctcctctcacggcaccggcagctacgggggattcctttcccaccgctccttcgctttcccttcctcgcccgccgtaataaatagacaccccctccacaccctctttccccaacctcgtgttgttcggagcgcacacacacacaaccagatctcccccaaatccacccgtcggcacctccgcttcaaggtacgccgctcgtcctcccccccccccctctctaccttctctagatcggcgttccggtccatgcatggttagggcccggtagttctacttctgttcatgtttgtgttagatccgtgtttgtgttagatccgtgctgctagcgttcgtacacggatgcgacctgtacgtcagacacgttctgattgctaacttgccagtgtttctctttggggaatcctgggatggctctagccgttccgcagacgggatcgatttcatgattttttttgtttcgttgcatagggtttggtttgcccttttcctttatttcaatatatgccgtgcacttgtttgtcgggtcatcttttcatgcttttttttgtcttggttgtgatgatgtggtctggttgggcggtcgttctagatcggagtagaattctgtttcaaactacctggtggatttattaattttggatctgtatgtgtgtgccatacatattcatagttacgaattgaagatgatggatggaaatatcgatctaggataggtatacatgttgatgcgggttttactgatgcatatacagagatgctttttgttcgcttggttgtgatgatgtggtgtggttgggcggtcgttcattcgttctagatcggagtagaatactgtttcaaactacctggtgtatttattaattttggaactgtatgtgtgtgtcatacatcttcatagttacgagtttaagatggatggaaatatcgatctaggataggtatacatgttgatgtgggttttactgatgcatatacatgatggcatatgcagcatctattcatatgctctaaccttgagtacctatctattataataaacaagtatgttttataattattttgatcttgatatacttggatgatggcatatgcagcagctatatgtggatttttttagccctgccttcatacgctatttatttgcttggtactgtttcttttgtcgatgctcaccctgttgtttggtgttacttctgcaggtcgactctagaggatcaattcgctagcgaagttcctattccgaagttcctattctctagaaagtataggaacttcagatccaccgggatccccgatcatgcaaaaactcattaactcagtgcaaaactatgcctggggcagcaaaacggcgttgactgaactttatggtatggaaaatccgtccagccagccgatggccgagctgtggatgggcgcacatccgaaaagcagttcacgagtgcagaatgccgccggagatatcgtttcactgcgtgatgtgattgagagtgataaatcgactctgctcggagaggccgttgccaaacgctttggcgaactgcctttcctgttcaaagtattatgcgcagcacagccactctccattcaggttcatccaaacaaacacaattctgaaatcggttttgccaaagaaaatgccgcaggtatcccgatggatgccgccgagcgtaactataaagatcctaaccacaagccggagctggtttttgcgctgacgcctttccttgcgatgaacgcgtttcgtgaattttccgagattgtctccctactccagccggtcgcaggtgcacatccggcgattgctcactttttacaacagcctgatgccgaacgtttaagcgaactgttcgccagcctgttgaatatgcagggtgaagaaaaatcccgcgcgctggcgattttaaaatcggccctcgatagccagcagggtgaaccgtggcaaacgattcgtttaatttctgaattttacccggaagacagcggtctgttctccccgctattgctgaatgtggtgaaattgaaccctggcgaagcgatgttcctgttcgctgaaacaccgcacgcttacctgcaaggcgtggcgctggaagtgatggcaaactccgataacgtgctgcgtgcgggtctgacgcctaaatacattgatattccggaactggttgccaatgtgaaattcgaagccaaaccggctaaccagttgttgacccagccggtgaaacaaggtgcagaactggacttcccgattccagtggatgattttgccttctcgctgcatgaccttagtgataaagaaaccaccattagccagcagagtgccgccattttgttctgcgtcgaaggcgatgcaacgttgtggaaaggttctcagcagttacagcttaaaccgggtgaatcagcgtttattgccgccaacgaatcaccggtgactgtcaaaggccacggccgtttagcgcgtgtttacaacaagctgtaagagcttactgaaaaaattaacatctcttgctaagctgggggtggaacctagacttgtccatcttctggattggccaacttaattaatgtatgaaataaaaggatgcacacatagtgacatgctaatcactataatgtgggcatcaaagttgtgtgttatgtgtaattactagttatctgaataaaagagaaagagatcatccatatttcttatcctaaatgaatgtcacgtgtctttataattctttgatgaaccagatgcatttcattaaccaaatccatatacatataaatattaatcatatataattaatatcaattgggttagcaaaacaaatctagtctaggtgtgttttgcgaatgcggccctagcgtatacgaagttcctattccgaagttcctattctccagaaagtataggaacttctgtacacctgagctgattccgatgacttcgtaggttcctagctcaagccgctcgtgtccaagcgtcacttacgattagctaatgattacggcatctaggaccgactagctaactaactagtaccgaggccggccccgcgggagctcggccgcaaacagcctggtgacagacgaagccagcaagcacgtacgtacgcacgtctctgctggtctggatgtgtatggatatggacgtctcacgtctggacgtcgtcgtcgccgttgtattgtatcatgccaaccacttccgtaccgtaccccctcgcgtgccaacatgaccaccgccggtacgtctccatcgtcggccgtcggcgtctcaggcagctctcaattaagcggacgtgttttggtaatctggtggaacgccgcgcgcactgagggtttgggggccccggcggacgagcgagcgagagacggtgcatgcatgccaaatggcaacgagggcccgcccgcccatccaataaccaacccagacgtagcgcaaccaacgtacgagtcctgtgctggcgcgtacgactaccacgctagctgccgcgacatgcgaactacggtccaccaggcaccagccatgacaatatatactgtatatatatttttcttcttctttttgtttccgctctctcaagttcctgctctgctcctgcctgtccgcggtgccgatcggcgagagagcatgcatggacatggaccacgcgagatccaggaaccggcacgggcccatgcgtggcaggcggccgtttcgtcaggttccccgaaatgccccaactgcgcggctgcaggatggctcatggctggctgcctagctggcccgtgacaccgatcgatcggtaacgacgacgcacgcacctgaagcacaggaaggagcctccctctcgcatgcacgttagtact

SEQ ID NO: 258 - DNA, 5426 bp, Artificial Sequence
  TS9Cas-3 donor
agcaaggaactaaactgttattggacgcaaagtttagtactttatctttaacatctttcagcatttctatgtagatatttaagggctaaattttagcaagtgtgctgataaattttagcctaaatgtttctgttgggctaaattttagcaagtgtactgttaaattttagcatattccttttagagtggtatgggtgtgcatagactaaatgtttccgttgggccctaatttaacgatgtgtacgcaggcctgtttagatgacttggtaccggcatatggcctcgtactgtttcatttgatgacgcgagcgtgcggcccatgcagcagcagcacgccgggaaggcagcggattttgaagtactattggacagcgcggcgcggggaccgggtcgttggcgcgcggtggagtgggggtgggtggtcctggcgtcctgccctgcgcgatggtcgatggatgccccatgcgcgtgtaaccgcccagccgtcgccatccgaccaggtgggcagacgtacgtacggtggcacgcccacggcccatcggccatcgcgatcgcgttcgtatcgtgtcctcaataacgaaagcgccaacggaaggcgctgtcgtcgtcagttcaccgcgcgccggcgccctgtgtcctcgtccctctcgacttctcgaccagtaagaactctcgcgagctgcggagctgctggcgatggccggccggtgggatccgacgatttaaatcttaagcctaggataacttcgtatagcatacattatacgaagttatggcgccgctagcctgcagtgcagcgtgacccggtcgtgcccctctctagagataatgagcattgcatgtctaagttataaaaaattaccacatattttttttgtcacacttgtttgaagtgcagtttatctatctttatacatatatttaaactttactctacgaataatataatctatagtactacaataatatcagtgttttagagaatcatataaatgaacagttagacatggtctaaaggacaattgagtattttgacaacaggactctacagttttatctttttagtgtgcatgtgttctcctttttttttgcaaatagcttcacctatataatacttcatccattttattagtacatccatttagggtttagggttaatggtttttatagactaatttttttagtacatctattttattctattttagcctctaaattaagaaaactaaaactctattttagtttttttatttaataatttagatataaaatagaataaaataaagtgactaaaaattaaacaaataccctttaagaaattaaaaaaactaaggaaacatttttcttgtttcgagtagataatgccagcctgttaaacgccgtcgacgagtctaacggacaccaaccagcgaaccagcagcgtcgcgtcgggccaagcgaagcagacggcacggcatctctgtcgctgcctctggacccctctcgagagttccgctccaccgttggacttgctccgctgtcggcatccagaaattgcgtggcggagcggcagacgtgagccggcacggcaggcggcctcctcctcctctcacggcaccggcagctacgggggattcctttcccaccgctccttcgctttcccttcctcgcccgccgtaataaatagacaccccctccacaccctctttccccaacctcgtgttgttcggagcgcacacacacacaaccagatctcccccaaatccacccgtcggcacctccgcttcaaggtacgccgctcgtcctcccccccccccctctctaccttctctagatcggcgttccggtccatgcatggttagggcccggtagttctacttctgttcatgtttgtgttagatccgtgtttgtgttagatccgtgctgctagcgttcgtacacggatgcgacctgtacgtcagacacgttctgattgctaacttgccagtgtttctctttggggaatcctgggatggctctagccgttccgcagacgggatcgatttcatgattttttttgtttcgttgcatagggtttggtttgcccttttcctttatttcaatatatgccgtgcacttgtttgtcgggtcatcttttcatgcttttttttgtcttggttgtgatgatgtggtctggttgggcggtcgttctagatcggagtagaattctgtttcaaactacctggtggatttattaattttggatctgtatgtgtgtgccatacatattcatagttacgaattgaagatgatggatggaaatatcgatctaggataggtatacatgttgatgcgggttttactgatgcatatacagagatgctttttgttcgcttggttgtgatgatgtggtgtggttgggcggtcgttcattcgttctagatcggagtagaatactgtttcaaactacctggtgtatttattaattttggaactgtatgtgtgtgtcatacatcttcatagttacgagtttaagatggatggaaatatcgatctaggataggtatacatgttgatgtgggttttactgatgcatatacatgatggcatatgcagcatctattcatatgctctaaccttgagtacctatctattataataaacaagtatgttttataattattttgatcttgatatacttggatgatggcatatgcagcagctatatgtggatttttttagccctgccttcatacgctatttatttgcttggtactgtttcttttgtcgatgctcaccctgttgtttggtgttacttctgcaggtcgactctagaggatcaattcgctagcgaagttcctattccgaagttcctattctctagaaagtataggaacttcagatccaccgggatccccgatcatgcaaaaactcattaactcagtgcaaaactatgcctggggcagcaaaacggcgttgactgaactttatggtatggaaaatccgtccagccagccgatggccgagctgtggatgggcgcacatccgaaaagcagttcacgagtgcagaatgccgccggagatatcgtttcactgcgtgatgtgattgagagtgataaatcgactctgctcggagaggccgttgccaaacgctttggcgaactgcctttcctgttcaaagtattatgcgcagcacagccactctccattcaggttcatccaaacaaacacaattctgaaatcggttttgccaaagaaaatgccgcaggtatcccgatggatgccgccgagcgtaactataaagatcctaaccacaagccggagctggtttttgcgctgacgcctttccttgcgatgaacgcgtttcgtgaattttccgagattgtctccctactccagccggtcgcaggtgcacatccggcgattgctcactttttacaacagcctgatgccgaacgtttaagcgaactgttcgccagcctgttgaatatgcagggtgaagaaaaatcccgcgcgctggcgattttaaaatcggccctcgatagccagcagggtgaaccgtggcaaacgattcgtttaatttctgaattttacccggaagacagcggtctgttctccccgctattgctgaatgtggtgaaattgaaccctggcgaagcgatgttcctgttcgctgaaacaccgcacgcttacctgcaaggcgtggcgctggaagtgatggcaaactccgataacgtgctgcgtgcgggtctgacgcctaaatacattgatattccggaactggttgccaatgtgaaattcgaagccaaaccggctaaccagttgttgacccagccggtgaaacaaggtgcagaactggacttcccgattccagtggatgattttgccttctcgctgcatgaccttagtgataaagaaaccaccattagccagcagagtgccgccattttgttctgcgtcgaaggcgatgcaacgttgtggaaaggttctcagcagttacagcttaaaccgggtgaatcagcgtttattgccgccaacgaatcaccggtgactgtcaaaggccacggccgtttagcgcgtgtttacaacaagctgtaagagcttactgaaaaaattaacatctcttgctaagctgggggtggaacctagacttgtccatcttctggattggccaacttaattaatgtatgaaataaaaggatgcacacatagtgacatgctaatcactataatgtgggcatcaaagttgtgtgttatgtgtaattactagttatctgaataaaagagaaagagatcatccatatttcttatcctaaatgaatgtcacgtgtctttataattctttgatgaaccagatgcatttcattaaccaaatccatatacatataaatattaatcatatataattaatatcaattgggttagcaaaacaaatctagtctaggtgtgttttgcgaatgcggccctagcgtatacgaagttcctattccgaagttcctattctccagaaagtataggaacttctgtacacctgagctgattccgatgacttcgtaggttcctagctcaagccgctcgtgtccaagcgtcacttacgattagctaatgattacggcatctaggaccgactagctaactaactagtaccgaggccggccccgcgggagctctgcgtgcaacctcgaggccgcaaacagcctggtgacagacgaagccagcaagcacgtacgtacgcacgtctctgctggtctggatgtgtatggatatggacgtctcacgtctggacgtcgtcgtcgccgttgtattgtatcatgccaaccacttccgtaccgtaccccctcgcgtgccaacatgaccaccgccggtacgtctccatcgtcggccgtcggcgtctcaggcagctctcaattaagcggacgtgttttggtaatctggtggaacgccgcgcgcactgagggtttgggggccccggcggacgagcgagcgagagacggtgcatgcatgccaaatggcaacgagggcccgcccgcccatccaataaccaacccagacgtagcgcaaccaacgtacgagtcctgtgctggcgcgtacgactaccacgctagctgccgcgacatgcgaactacggtccaccaggcaccagccatgacaatatatactgtatatatatttttcttcttctttttgtttccgctctctcaagttcctgctctgctcctgcctgtccgcggtgccgatcggcgagagagcatgcatggacatggaccacgcgagatccaggaaccggcacgggcccatgcgtggcaggcggccgtttcgtcaggttccccgaaatgccccaactgcgcggctgcaggatggctcatggctggctgcctagctggcccgtgacaccgatcgatcggtaacgacgacgcacgcacctgaagcacaggaaggagcctccctctcgcatgcacgttagtact

SEQ ID NO: 259 - DNA, 5152 bp, Artificial Sequence
  TS10Cas-1 donor
ggtaccaaatagtaaacgggaggggaggtcgctagtagtaaacgctaggtagctaggataatccgtctcgtgttggacggaaggttttggacgcatctgcgtgcacagcccgctgatacagatctgatcgactagctagctagatgccgaggccccagagcaaggcccggatactcctgcacagtccctgagatttcagcacagcaggtgctgttgcatcaatatataaatccctgctttattaatttaatctctgtgcatgtatccatacatcgtcagcggctcagcgctatcacactgcagtgcacgcagctagttgagcgcctgggtcagtatatatatagctagtagggacaaaggggggcactgtacgttggtttggtttggcacgcacgcgatcgagagtggtggaatggactgcagatcatcgatcgctgcactgtacgcacgcgcaccggactgcatttgcatgcccctgaaggaggaaaggggaaggaaagaaaagaaataggagaaagaagaagaagcagagaaatacgtcacagtccaagaagagtgagccgccctagctagcttcaaccctgacgaacccggcagccacacttccggccatgtatgcatgcatgcatggcttagcttcagatgtccaatcgaatccatcaagacctggccggttttccatggccgcctcgccttcgctagtggtaccatttaaatcttaagcctaggataacttcgtatagcatacattatacgaagttatggcgccgctagcctgcagtgcagcgtgacccggtcgtgcccctctctagagataatgagcattgcatgtctaagttataaaaaattaccacatattttttttgtcacacttgtttgaagtgcagtttatctatctttatacatatatttaaactttactctacgaataatataatctatagtactacaataatatcagtgttttagagaatcatataaatgaacagttagacatggtctaaaggacaattgagtattttgacaacaggactctacagttttatctttttagtgtgcatgtgttctcctttttttttgcaaatagcttcacctatataatacttcatccattttattagtacatccatttagggtttagggttaatggtttttatagactaatttttttagtacatctattttattctattttagcctctaaattaagaaaactaaaactctattttagtttttttatttaataatttagatataaaatagaataaaataaagtgactaaaaattaaacaaataccctttaagaaattaaaaaaactaaggaaacatttttcttgtttcgagtagataatgccagcctgttaaacgccgtcgacgagtctaacggacaccaaccagcgaaccagcagcgtcgcgtcgggccaagcgaagcagacggcacggcatctctgtcgctgcctctggacccctctcgagagttccgctccaccgttggacttgctccgctgtcggcatccagaaattgcgtggcggagcggcagacgtgagccggcacggcaggcggcctcctcctcctctcacggcaccggcagctacgggggattcctttcccaccgctccttcgctttcccttcctcgcccgccgtaataaatagacaccccctccacaccctctttccccaacctcgtgttgttcggagcgcacacacacacaaccagatctcccccaaatccacccgtcggcacctccgcttcaaggtacgccgctcgtcctcccccccccccctctctaccttctctagatcggcgttccggtccatgcatggttagggcccggtagttctacttctgttcatgtttgtgttagatccgtgtttgtgttagatccgtgctgctagcgttcgtacacggatgcgacctgtacgtcagacacgttctgattgctaacttgccagtgtttctctttggggaatcctgggatggctctagccgttccgcagacgggatcgatttcatgattttttttgtttcgttgcatagggtttggtttgcccttttcctttatttcaatatatgccgtgcacttgtttgtcgggtcatcttttcatgcttttttttgtcttggttgtgatgatgtggtctggttgggcggtcgttctagatcggagtagaattctgtttcaaactacctggtggatttattaattttggatctgtatgtgtgtgccatacatattcatagttacgaattgaagatgatggatggaaatatcgatctaggataggtatacatgttgatgcgggttttactgatgcatatacagagatgctttttgttcgcttggttgtgatgatgtggtgtggttgggcggtcgttcattcgttctagatcggagtagaatactgtttcaaactacctggtgtatttattaattttggaactgtatgtgtgtgtcatacatcttcatagttacgagtttaagatggatggaaatatcgatctaggataggtatacatgttgatgtgggttttactgatgcatatacatgatggcatatgcagcatctattcatatgctctaaccttgagtacctatctattataataaacaagtatgttttataattattttgatcttgatatacttggatgatggcatatgcagcagctatatgtggatttttttagccctgccttcatacgctatttatttgcttggtactgtttcttttgtcgatgctcaccctgttgtttggtgttacttctgcaggtcgactctagaggatcaattcgctagcgaagttcctattccgaagttcctattctctagaaagtataggaacttcagatccaccgggatccccgatcatgcaaaaactcattaactcagtgcaaaactatgcctggggcagcaaaacggcgttgactgaactttatggtatggaaaatccgtccagccagccgatggccgagctgtggatgggcgcacatccgaaaagcagttcacgagtgcagaatgccgccggagatatcgtttcactgcgtgatgtgattgagagtgataaatcgactctgctcggagaggccgttgccaaacgctttggcgaactgcctttcctgttcaaagtattatgcgcagcacagccactctccattcaggttcatccaaacaaacacaattctgaaatcggttttgccaaagaaaatgccgcaggtatcccgatggatgccgccgagcgtaactataaagatcctaaccacaagccggagctggtttttgcgctgacgcctttccttgcgatgaacgcgtttcgtgaattttccgagattgtctccctactccagccggtcgcaggtgcacatccggcgattgctcactttttacaacagcctgatgccgaacgtttaagcgaactgttcgccagcctgttgaatatgcagggtgaagaaaaatcccgcgcgctggcgattttaaaatcggccctcgatagccagcagggtgaaccgtggcaaacgattcgtttaatttctgaattttacccggaagacagcggtctgttctccccgctattgctgaatgtggtgaaattgaaccctggcgaagcgatgttcctgttcgctgaaacaccgcacgcttacctgcaaggcgtggcgctggaagtgatggcaaactccgataacgtgctgcgtgcgggtctgacgcctaaatacattgatattccggaactggttgccaatgtgaaattcgaagccaaaccggctaaccagttgttgacccagccggtgaaacaaggtgcagaactggacttcccgattccagtggatgattttgccttctcgctgcatgaccttagtgataaagaaaccaccattagccagcagagtgccgccattttgttctgcgtcgaaggcgatgcaacgttgtggaaaggttctcagcagttacagcttaaaccgggtgaatcagcgtttattgccgccaacgaatcaccggtgactgtcaaaggccacggccgtttagcgcgtgtttacaacaagctgtaagagcttactgaaaaaattaacatctcttgctaagctgggggtggaacctagacttgtccatcttctggattggccaacttaattaatgtatgaaataaaaggatgcacacatagtgacatgctaatcactataatgtgggcatcaaagttgtgtgttatgtgtaattactagttatctgaataaaagagaaagagatcatccatatttcttatcctaaatgaatgtcacgtgtctttataattctttgatgaaccagatgcatttcattaaccaaatccatatacatataaatattaatcatatataattaatatcaattgggttagcaaaacaaatctagtctaggtgtgttttgcgaatgcggccctagcgtatacgaagttcctattccgaagttcctattctccagaaagtataggaacttctgtacacctgagctgattccgatgacttcgtaggttcctagctcaagccgctcgtgtccaagcgtcacttacgattagctaatgattacggcatctaggaccgactagctaactaactagtaccgaggccggccccgcgggagctcggcgcgcctaagggccaagtacttgctgtccctgtatctccaacacgagccttgattcctgccggccggtgatggcaatggccgctagtagtctccgctagctagggagcggcgatccgacgcgacgccaccatgtgtctagaaaagaagtttcttgctttgcatgcagacttattagcgcggtcgacacctgtggggaccccgtgtcttgagacaatgagactgcctgtccgcccaagacactacttgtagccatgaagccatcgactcctctccttgctctccagtaatccagtggatggatccatcatcgatagtttagtttatcagtcttcttgaggccggtgtcccccatgcataatgatgacagaaagcctgggccaggtaaaagccaaaaagtttgaccctctaggtactggggccagccctggcgtttgaacaaaaaaaaaatctgagcgtgtcgccccggcctgttttcgaactcctaaacgacgtcgcaactttttttatacacacactaccggtacatggcttt

SEQ ID NO: 260 - DNA, 5146 bp, Artificial Sequence
  TS10Cas-3 donor
aaatagtaaacgggaggggaggtcgctagtagtaaacgctaggtagctaggataatccgtctcgtgttggacggaaggttttggacgcatctgcgtgcacagcccgctgatacagatctgatcgactagctagctagatgccgaggccccagagcaaggcccggatactcctgcacagtccctgagatttcagcacagcaggtgctgttgcatcaatatataaatccctgctttattaatttaatctctgtgcatgtatccatacatcgtcagcggctcagcgctatcacactgcagtgcacgcagctagttgagcgcctgggtcagtatatatatagctagtagggacaaaggggggcactgtacgttggtttggtttggcacgcacgcgatcgagagtggtggaatggactgcagatcatcgatcgctgcactgtacgcacgcgcaccggactgcatttgcatgcccctgaaggaggaaaggggaaggaaagaaaagaaataggagaaagaagaagaagcagagaaatacgtcacagtccaagaagagtgagccgccctagctagcttcaaccctgacgaacccggcagccacacttccggccatgtatgcatgcatgcatggcttagcttcagatgtccaatcgaatccatcaagacctggccggttttccatggccgcctcgccttcgctagttaagggccaagtacttgctgtccctgtggtaccatttaaatcttaagcctaggataacttcgtatagcatacattatacgaagttatggcgccgctagcctgcagtgcagcgtgacccggtcgtgcccctctctagagataatgagcattgcatgtctaagttataaaaaattaccacatattttttttgtcacacttgtttgaagtgcagtttatctatctttatacatatatttaaactttactctacgaataatataatctatagtactacaataatatcagtgttttagagaatcatataaatgaacagttagacatggtctaaaggacaattgagtattttgacaacaggactctacagttttatctttttagtgtgcatgtgttctcctttttttttgcaaatagcttcacctatataatacttcatccattttattagtacatccatttagggtttagggttaatggtttttatagactaatttttttagtacatctattttattctattttagcctctaaattaagaaaactaaaactctattttagtttttttatttaataatttagatataaaatagaataaaataaagtgactaaaaattaaacaaataccctttaagaaattaaaaaaactaaggaaacatttttcttgtttcgagtagataatgccagcctgttaaacgccgtcgacgagtctaacggacaccaaccagcgaaccagcagcgtcgcgtcgggccaagcgaagcagacggcacggcatctctgtcgctgcctctggacccctctcgagagttccgctccaccgttggacttgctccgctgtcggcatccagaaattgcgtggcggagcggcagacgtgagccggcacggcaggcggcctcctcctcctctcacggcaccggcagctacgggggattcctttcccaccgctccttcgctttcccttcctcgcccgccgtaataaatagacaccccctccacaccctctttccccaacctcgtgttgttcggagcgcacacacacacaaccagatctcccccaaatccacccgtcggcacctccgcttcaaggtacgccgctcgtcctcccccccccccctctctaccttctctagatcggcgttccggtccatgcatggttagggcccggtagttctacttctgttcatgtttgtgttagatccgtgtttgtgttagatccgtgctgctagcgttcgtacacggatgcgacctgtacgtcagacacgttctgattgctaacttgccagtgtttctctttggggaatcctgggatggctctagccgttccgcagacgggatcgatttcatgattttttttgtttcgttgcatagggtttggtttgcccttttcctttatttcaatatatgccgtgcacttgtttgtcgggtcatcttttcatgcttttttttgtcttggttgtgatgatgtggtctggttgggcggtcgttctagatcggagtagaattctgtttcaaactacctggtggatttattaattttggatctgtatgtgtgtgccatacatattcatagttacgaattgaagatgatggatggaaatatcgatctaggataggtatacatgttgatgcgggttttactgatgcatatacagagatgctttttgttcgcttggttgtgatgatgtggtgtggttgggcggtcgttcattcgttctagatcggagtagaatactgtttcaaactacctggtgtatttattaattttggaactgtatgtgtgtgtcatacatcttcatagttacgagtttaagatggatggaaatatcgatctaggataggtatacatgttgatgtgggttttactgatgcatatacatgatggcatatgcagcatctattcatatgctctaaccttgagtacctatctattataataaacaagtatgttttataattattttgatcttgatatacttggatgatggcatatgcagcagctatatgtggatttttttagccctgccttcatacgctatttatttgcttggtactgtttcttttgtcgatgctcaccctgttgtttggtgttacttctgcaggtcgactctagaggatcaattcgctagcgaagttcctattccgaagttcctattctctagaaagtataggaacttcagatccaccgggatccccgatcatgcaaaaactcattaactcagtgcaaaactatgcctggggcagcaaaacggcgttgactgaactttatggtatggaaaatccgtccagccagccgatggccgagctgtggatgggcgcacatccgaaaagcagttcacgagtgcagaatgccgccggagatatcgtttcactgcgtgatgtgattgagagtgataaatcgactctgctcggagaggccgttgccaaacgctttggcgaactgcctttcctgttcaaagtattatgcgcagcacagccactctccattcaggttcatccaaacaaacacaattctgaaatcggttttgccaaagaaaatgccgcaggtatcccgatggatgccgccgagcgtaactataaagatcctaaccacaagccggagctggtttttgcgctgacgcctttccttgcgatgaacgcgtttcgtgaattttccgagattgtctccctactccagccggtcgcaggtgcacatccggcgattgctcactttttacaacagcctgatgccgaacgtttaagcgaactgttcgccagcctgttgaatatgcagggtgaagaaaaatcccgcgcgctggcgattttaaaatcggccctcgatagccagcagggtgaaccgtggcaaacgattcgtttaatttctgaattttacccggaagacagcggtctgttctccccgctattgctgaatgtggtgaaattgaaccctggcgaagcgatgttcctgttcgctgaaacaccgcacgcttacctgcaaggcgtggcgctggaagtgatggcaaactccgataacgtgctgcgtgcgggtctgacgcctaaatacattgatattccggaactggttgccaatgtgaaattcgaagccaaaccggctaaccagttgttgacccagccggtgaaacaaggtgcagaactggacttcccgattccagtggatgattttgccttctcgctgcatgaccttagtgataaagaaaccaccattagccagcagagtgccgccattttgttctgcgtcgaaggcgatgcaacgttgtggaaaggttctcagcagttacagcttaaaccgggtgaatcagcgtttattgccgccaacgaatcaccggtgactgtcaaaggccacggccgtttagcgcgtgtttacaacaagctgtaagagcttactgaaaaaattaacatctcttgctaagctgggggtggaacctagacttgtccatcttctggattggccaacttaattaatgtatgaaataaaaggatgcacacatagtgacatgctaatcactataatgtgggcatcaaagttgtgtgttatgtgtaattactagttatctgaataaaagagaaagagatcatccatatttcttatcctaaatgaatgtcacgtgtctttataattctttgatgaaccagatgcatttcattaaccaaatccatatacatataaatattaatcatatataattaatatcaattgggttagcaaaacaaatctagtctaggtgtgttttgcgaatgcggccctagcgtatacgaagttcctattccgaagttcctattctccagaaagtataggaacttctgtacacctgagctgattccgatgacttcgtaggttcctagctcaagccgctcgtgtccaagcgtcacttacgattagctaatgattacggcatctaggaccgactagctaactaactagtaccgaggccggccccgcgggagctcggcgcgccatctccaacacgagccttgattcctgccggccggtgatggcaatggccgctagtagtctccgctagctagggagcggcgatccgacgcgacgccaccatgtgtctagaaaagaagtttcttgctttgcatgcagacttattagcgcggtcgacacctgtggggaccccgtgtcttgagacaatgagactgcctgtccgcccaagacactacttgtagccatgaagccatcgactcctctccttgctctccagtaatccagtggatggatccatcatcgatagtttagtttatcagtcttcttgaggccggtgtcccccatgcataatgatgacagaaagcctgggccaggtaaaagccaaaaagtttgaccctctaggtactggggccagccctggcgtttgaacaaaaaaaaaatctgagcgtgtcgccccggcctgttttcgaactcctaaacgacgtcgcaactttttttatacacacactaccggtacatggcttt

SEQ ID NO: 261 - DNA, 32 bp, Artificial Sequence; identical to SEQ ID NO: 100
  ubir primer from donor

SEQ ID NO: 262 - DNA, 31 bp, Artificial Sequence; identical to SEQ ID NO: 99
  psbf primer from dono

SEQ ID NO: 263 - DNA, 27 bp, Artificial Sequences
  MHP14 14-1HR1f primer
ctcacatgaggctcttctttgcttgct

SEQ ID NO: 264 - DNA, 26 bp, Artificial Sequence
  MHP14 14-1HR2r primer
aggatcctattccccaatttgtagat

SEQ ID NO: 265 - DNA, 21 bp, Artificial Sequence
  CHR1-8 8HR1f primer
cagtccgtggattgaagccat

SEQ ID NO: 266 - DNA, 22 bp, Artificial Sequence
  CHR1-8 8HR2r primer
ctctgtctccgagacgtgctta

SEQ ID NO: 267 - DNA, 26 bp, Artificial Sequence
  CHR1-9 9HR1f primer
ggagcaaatgttttaggtatgaaatg

SEQ ID NO: 268 - DNA, 28 bp, Artificial Sequence
  CHR1-9  9HR2r primer
cggattctaaagatcatacgtaaatgaa

SEQ ID NO: 269 - DNA, 21 bp, Artificial Sequence
  CHR1-10  10HR1f primer
tggcttgtctatgcgcatctc

SEQ ID NO: 270 - DNA, 20 bp, Artificial Sequence
  CHR1-10  10HR2r primer
ccagacccaaacagcaggtt

SEQ ID NO: 271 - DNA, 18 bp, Artificial Sequence
  MHP14Cas-1 probe
cagattcacgtcagattt

SEQ ID NO: 272 - DNA, 27 bp, Artificial Sequence
  MHP14cas-1 forward primer
catagtggtgtatgaaaggaagcactt

SEQ ID NO: 273 - DNA, 30 bp, Artificial Sequence
  MHP14cas-1 reverse primer
cattttggattgtaatatgtgtacctcata

SEQ ID NO: 274 - DNA, 17 bp, Artificial Sequence
  MHP14Cas-3 probe
caccactatgtcgcttc

SEQ ID NO: 275 - DNA, 22 bp, Artificial Sequence
  MHP14Cas-3 forward primer
cggatgcacgaaaattgtagga

SEQ ID NO: 276 - DNA, 24 bp, Artificial Sequence
  MHP14Cas-3 reverse primer
ctgacgtgaatctgtttggaattg

SEQ ID NO: 277 - DNA, 18 bp, Artificial Sequence
  TS8Cas-1 probe
tacgtaacgtgcagtact

SEQ ID NO: 278 - DNA, 21 bp, Artificial Sequence
  TS8Cas-1 forward primer
acggacggaccatacgttatg

SEQ ID NO: 279 - DNA, 26 bp, Artificial Sequence
  TS8Cas-1 reverse primer
tcagctggtggagtatattagttcgt

SEQ ID NO: 280 - DNA, 18 bp, Artificial Sequence
  TS8Cas-2 probe
ccagctgatcactgatga

SEQ ID NO: 281 - DNA, 21 bp, Artificial Sequence
  TS8Cas-2 forward primer
acggacggaccatacgttatg

SEQ ID NO: 282 - DNA, 26 bp, Artificial Sequence
  TS8Cas-2 reverse primer
cgcacatgttataaattacaatgcat

SEQ ID NO: 283 - DNA, 14 bp, Artificial Sequence
  TS9Cas-2 probe
ctgtttgcggcctc

SEQ ID NO: 284 - DNA, 19 bp, Artificial Sequence
  TS9Cas-2 forward primer
ctgcggagctgctggcgat

SEQ ID NO: 285 - DNA, 20 bp, Artificial Sequence
  TS9Cas-2 reverse primer
cttgctggcttcgtctgtca

SEQ ID NO: 286 - DNA, 15 bp, Artificial Sequence
  TS9Cas-3 probe
ccgacgtgcgtgcaa

SEQ ID NO: 287 - DNA, 19 bp, Artificial Sequence
  TS9Cas-3 forward primer
ctgcggagctgctggcgat

SEQ ID NO: 288 - DNA, 20 bp, Artificial Sequence
  TS9Cas-3 reverse primer
cttgctggcttcgtctgtca

SEQ ID NO: 289 - DNA, 17 bp, Artificial Sequence
  TS10Cas-1 probe
tcgccttcgctagttaa

SEQ ID NO: 290 - DNA, 20 bp, Artificial Sequence
  TS10Cas-1 forward primer
aagacctggccggttttcca

SEQ ID NO: 291 - DNA, 18 bp, Artificial Sequence
  TS10Cas-1 reverse primer
tagcggccattgccatca

SEQ ID NO: 292 - DNA, 19 bp, Artificial Sequence
  TS10Cas-3 probe
ctgtatctccaacacgagc

SEQ ID NO: 293 - DNA, 20 bp, Artificial Sequence
  TS10Cas-3 forward primer
aagacctggccggttttcca

SEQ ID NO: 294 - DNA, 18 bp, Artificial Sequence
  TS10Cas-3 reverse primer
tagcggccattgccatca

SEQ ID NO: 295 - DNA, 472 bp, Glycine max
  GM-U6-9.1 promoter (1)..(472)
cccgggttaagagaattgtaagtgtgcttttatatatttaaaattaatatattttgaaatgttaaaatataaaagaaaattcaatgtaaattaaaaataaataaatgtttaataaagataaattttaaaacataaaagaaaatgtctaacaagaggattaagatcctgtgctcttaaatttttaggtgttgaaatcttagccatacaaaatatattttattaaaaccaagcatgaaaaaagtcactaaagagctatataactcatgcagctagaaatgaagtgaagggaatccagtttgttctcagtcgaaagagtgtctatctttgttcttttctgcaaccgagttaagcaaaatgggaatgcgaggtatcttcctttcgttaggggagcaccagatgcatagttagtcccacattgatgaatataacaagagcttcacagaatatatagcccaggccacagtaaaagctt

SEQ ID NO: 296 - DNA, 5958 bp, Artificial sequence
  EF1A2-CAS9
gggtttacttattttgtgggtatctatacttttattagatttttaatcaggctcctgatttctttttatttcgattgaattcctgaacttgtattattcagtagatcgaataaattataaaaagataaaatcataaaataatattttatcctatcaatcatattaaagcaatgaatatgtaaaattaatcttatctttattttaaaaaatcatataggtttagtatttttttaaaaataaagataggattagttttactattcactgcttattacttttaaaaaaatcataaaggtttagtatttttttaaaataaatataggaatagttttactattcactgctttaatagaaaaatagtttaaaatttaagatagttttaatcccagcatttgccacgtttgaacgtgagccgaaacgatgtcgttacattatcttaacctagctgaaacgatgtcgtcataatatcgccaaatgccaactggactacgtcgaacccacaaatcccacaaagcgcgtgaaatcaaatcgctcaaaccacaaaaaagaacaacgcgtttgttacacgctcaatcccacgcgagtagagcacagtaaccttcaaataagcgaatggggcataatcagaaatccgaaataaacctaggggcattatcggaaatgaaaagtagctcactcaatataaaaatctaggaaccctagttttcgttatcactctgtgctccctcgctctatttctcagtctctgtgtttgcggctgaggattccgaacgagtgaccttcttcgtttctcgcaaaggtaacagcctctgctcttgtctcttcgattcgatctatgcctgtctcttatttacgatgatgtttcttcggttatgtttttttatttatgctttatgctgttgatgttcggttgtttgtttcgctttgtttttgtggttcagttttttaggattcttttggtttttgaatcgattaatcggaagagattttcgagttatttggtgtgttggaggtgaatcttttttttgaggtcatagatctgttgtatttgtgttataaacatgcgactttgtatgattttttacgaggttatgatgttctggttgttttattatgaatctgttgagacagaaccatgatttttgttgatgttcgtttacactattaaaggtttgttttaacaggattaaaagttttttaagcatgttgaaggagtcttgtagatatgtaaccgtcgatagtttttttgtgggtttgttcacatgttatcaagcttaatcttttactatgtatgcgaccatatctggatccagcaaaggcgattttttaattccttgtgaaacttttgtaatatgaagttgaaattttgttattggtaaactataaatgtgtgaagttggagtatacctttaccttcttatttggctttgtgatagtttaatttatatgtattttgagttctgacttgtatttctttgaattgattctagtttaagtaatccatggacaaaaagtactcaatagggctcgacatagggactaactccgttggatgggccgtcatcaccgacgagtacaaggtgccctccaagaagttcaaggtgttgggaaacaccgacaggcacagcataaagaagaatttgatcggtgccctcctcttcgactccggagagaccgctgaggctaccaggctcaagaggaccgctagaaggcgctacaccagaaggaagaacagaatctgctacctgcaggagatcttctccaacgagatggccaaggtggacgactccttcttccaccgccttgaggaatcattcctggtggaggaggataaaaagcacgagagacacccaatcttcgggaacatcgtcgacgaggtggcctaccatgaaaagtaccctaccatctaccacctgaggaagaagctggtcgactctaccgacaaggctgacttgcgcttgatttacctggctctcgctcacatgataaagttccgcggacacttcctcattgagggagacctgaacccagacaactccgacgtggacaagctcttcatccagctcgttcagacctacaaccagcttttcgaggagaacccaatcaacgccagtggagttgacgccaaggctatcctctctgctcgtctgtcaaagtccaggaggcttgagaacttgattgcccagctgcctggcgaaaagaagaacggactgttcggaaacttgatcgctctctccctgggattgactcccaacttcaagtccaacttcgacctcgccgaggacgctaagttgcagttgtctaaagacacctacgacgatgacctcgacaacttgctggcccagataggcgaccaatacgccgatctcttcctcgccgctaagaacttgtccgacgcaatcctgctgtccgacatcctgagagtcaacactgagattaccaaagctcctctgtctgcttccatgattaagcgctacgacgagcaccaccaagatctgaccctgctcaaggccctggtgagacagcagctgcccgagaagtacaaggagatctttttcgaccagtccaagaacggctacgccggatacattgacggaggcgcctcccaggaagagttctacaagttcatcaagcccatccttgagaagatggacggtaccgaggagctgttggtgaagttgaacagagaggacctgttgaggaagcagagaaccttcgacaacggaagcatccctcaccaaatccacctgggagagctccacgccatcttgaggaggcaggaggatttctatcccttcctgaaggacaaccgcgagaagattgagaagatcttgaccttcagaattccttactacgtcgggccactcgccagaggaaactctaggttcgcctggatgacccgcaaatctgaagagaccattactccctggaacttcgaggaagtcgtggacaagggcgcttccgctcagtctttcatcgagaggatgaccaacttcgataaaaatctgcccaacgagaaggtgctgcccaagcactccctgttgtacgagtatttcacagtgtacaacgagctcaccaaggtgaagtacgtcacagagggaatgaggaagcctgccttcttgtccggagagcagaagaaggccatcgtcgacctgctcttcaagaccaacaggaaggtgactgtcaagcagctgaaggaggactacttcaagaagatcgagtgcttcgactccgtcgagatctctggtgtcgaggacaggttcaacgcctcccttgggacttaccacgatctgctcaagattattaaagacaaggacttcctggacaacgaggagaacgaggacatccttgaggacatcgtgctcaccctgaccttgttcgaagacagggaaatgatcgaagagaggctcaagacctacgcccacctcttcgacgacaaggtgatgaaacagctgaagagacgcagatataccggctggggaaggctctcccgcaaattgatcaacgggatcagggacaagcagtcagggaagactatactcgacttcctgaagtccgacggattcgccaacaggaacttcatgcagctcattcacgacgactccttgaccttcaaggaggacatccagaaggctcaggtgtctggacagggtgactccttgcatgagcacattgctaacttggccggctctcccgctattaagaagggcattttgcagaccgtgaaggtcgttgacgagctcgtgaaggtgatgggacgccacaagccagagaacatcgttattgagatggctcgcgagaaccaaactacccagaaagggcagaagaattcccgcgagaggatgaagcgcattgaggagggcataaaagagcttggctctcagatcctcaaggagcaccccgtcgagaacactcagctgcagaacgagaagctgtacctgtactacctccaaaacggaagggacatgtacgtggaccaggagctggacatcaacaggttgtccgactacgacgtcgaccacatcgtgcctcagtccttcctgaaggatgactccatcgacaataaagtgctgacacgctccgataaaaatagaggcaagtccgacaacgtcccctccgaggaggtcgtgaagaagatgaaaaactactggagacagctcttgaacgccaagctcatcacccagcgtaagttcgacaacctgactaaggctgagagaggaggattgtccgagctcgataaggccggattcatcaagagacagctcgtcgaaacccgccaaattaccaagcacgtggcccaaattctggattcccgcatgaacaccaagtacgatgaaaatgacaagctgatccgcgaggtcaaggtgatcaccttgaagtccaagctggtctccgacttccgcaaggacttccagttctacaaggtgagggagatcaacaactaccaccacgcacacgacgcctacctcaacgctgtcgttggaaccgccctcatcaaaaaatatcctaagctggagtctgagttcgtctacggcgactacaaggtgtacgacgtgaggaagatgatcgctaagtctgagcaggagatcggcaaggccaccgccaagtacttcttctactccaacatcatgaacttcttcaagaccgagatcactctcgccaacggtgagatcaggaagcgcccactgatcgagaccaacggtgagactggagagatcgtgtgggacaaagggagggatttcgctactgtgaggaaggtgctctccatgcctcaggtgaacatcgtcaagaagaccgaagttcagaccggaggattctccaaggagtccatcctccccaagagaaactccgacaagctgatcgctagaaagaaagactgggaccctaagaagtacggaggcttcgattctcctaccgtggcctactctgtgctggtcgtggccaaggtggagaagggcaagtccaagaagctgaaatccgtcaaggagctcctcgggattaccatcatggagaggagttccttcgagaagaaccctatcgacttcctggaggccaagggatataaagaggtgaagaaggacctcatcatcaagctgcccaagtactccctcttcgagttggagaacggaaggaagaggatgctggcttctgccggagagttgcagaagggaaatgagctcgcccttccctccaagtacgtgaacttcctgtacctcgcctctcactatgaaaagttgaagggctctcctgaggacaacgagcagaagcagctcttcgtggagcagcacaagcactacctggacgaaattatcgagcagatctctgagttctccaagcgcgtgatattggccgacgccaacctcgacaaggtgctgtccgcctacaacaagcacagggataagcccattcgcgagcaggctgaaaacattatccacctgtttaccctcacaaacttgggagcccctgctgccttcaagtacttcgacaccaccattgacaggaagagatacacctccaccaaggaggtgctcgacgcaacactcatccaccaatccatcaccggcctctatgaaacaaggattgacttgtcccagctgggaggcgactctagagccgatcccaagaagaagagaaaggtgtaggttaacctagacttgtccatcttctggattggccaacttaattaatgtatgaaataaaaggatgcacacatagtgacatgctaatcactataatgtgggcatcaaagttgtgtgttatgtgtaattactagttatctgaataaaagagaaagagatcatccatatttcttatcctaaatgaatgtcacgtgtctttataattctttgatgaaccagatgcatttcattaaccaaatccatatacatataaatattaatcatatataattaatatcaattgggttagcaaaacaaatctagtctaggtgtgttttgc

SEQ ID NO: 297 - DNA, 573 bp, Artificial sequence
  U6-9.1-DD20CR1
ccgggttaagagaattgtaagtgtgcttttatatatttaaaattaatatattttgaaatgttaaaatataaaagaaaattcaatgtaaattaaaaataaataaatgtttaataaagataaattttaaaacataaaagaaaatgtctaacaagaggattaagatcctgtgctcttaaatttttaggtgttgaaatcttagccatacaaaatatattttattaaaaccaagcatgaaaaaagtcactaaagagctatataactcatgcagctagaaatgaagtgaagggaatccagtttgttctcagtcgaaagagtgtctatctttgttcttttctgcaaccgagttaagcaaaatgggaatgcgaggtatcttcctttcgttaggggagcaccagatgcatagttagtcccacattgatgaatataacaagagcttcacagaatatatagcccaggccacagtaaaagcttggaactgacacacgacatgagttttagagctagaaatagcaagttaaaataaggctagtccgttatcaacttgaaaaagtggcaccgagtcggtgctttttt

SEQ ID NO: 298 - DNA, 6611 bp, Artificial sequence
  U6-9.1-DD20CR1+EF1A2-CAS9
cgcgccggtacccgggttaagagaattgtaagtgtgcttttatatatttaaaattaatatattttgaaatgttaaaatataaaagaaaattcaatgtaaattaaaaataaataaatgtttaataaagataaattttaaaacataaaagaaaatgtctaacaagaggattaagatcctgtgctcttaaatttttaggtgttgaaatcttagccatacaaaatatattttattaaaaccaagcatgaaaaaagtcactaaagagctatataactcatgcagctagaaatgaagtgaagggaatccagtttgttctcagtcgaaagagtgtctatctttgttcttttctgcaaccgagttaagcaaaatgggaatgcgaggtatcttcctttcgttaggggagcaccagatgcatagttagtcccacattgatgaatataacaagagcttcacagaatatatagcccaggccacagtaaaagcttggaactgacacacgacatgagttttagagctagaaatagcaagttaaaataaggctagtccgttatcaacttgaaaaagtggcaccgagtcggtgcttttttttgcggccgcaattggatcgggtttacttattttgtgggtatctatacttttattagatttttaatcaggctcctgatttctttttatttcgattgaattcctgaacttgtattattcagtagatcgaataaattataaaaagataaaatcataaaataatattttatcctatcaatcatattaaagcaatgaatatgtaaaattaatcttatctttattttaaaaaatcatataggtttagtatttttttaaaaataaagataggattagttttactattcactgcttattacttttaaaaaaatcataaaggtttagtatttttttaaaataaatataggaatagttttactattcactgctttaatagaaaaatagtttaaaatttaagatagttttaatcccagcatttgccacgtttgaacgtgagccgaaacgatgtcgttacattatcttaacctagctgaaacgatgtcgtcataatatcgccaaatgccaactggactacgtcgaacccacaaatcccacaaagcgcgtgaaatcaaatcgctcaaaccacaaaaaagaacaacgcgtttgttacacgctcaatcccacgcgagtagagcacagtaaccttcaaataagcgaatggggcataatcagaaatccgaaataaacctaggggcattatcggaaatgaaaagtagctcactcaatataaaaatctaggaaccctagttttcgttatcactctgtgctccctcgctctatttctcagtctctgtgtttgcggctgaggattccgaacgagtgaccttcttcgtttctcgcaaaggtaacagcctctgctcttgtctcttcgattcgatctatgcctgtctcttatttacgatgatgtttcttcggttatgtttttttatttatgctttatgctgttgatgttcggttgtttgtttcgctttgtttttgtggttcagttttttaggattcttttggtttttgaatcgattaatcggaagagattttcgagttatttggtgtgttggaggtgaatcttttttttgaggtcatagatctgttgtatttgtgttataaacatgcgactttgtatgattttttacgaggttatgatgttctggttgttttattatgaatctgttgagacagaaccatgatttttgttgatgttcgtttacactattaaaggtttgttttaacaggattaaaagttttttaagcatgttgaaggagtcttgtagatatgtaaccgtcgatagtttttttgtgggtttgttcacatgttatcaagcttaatcttttactatgtatgcgaccatatctggatccagcaaaggcgattttttaattccttgtgaaacttttgtaatatgaagttgaaattttgttattggtaaactataaatgtgtgaagttggagtatacctttaccttcttatttggctttgtgatagtttaatttatatgtattttgagttctgacttgtatttctttgaattgattctagtttaagtaatccatggacaaaaagtactcaatagggctcgacatagggactaactccgttggatgggccgtcatcaccgacgagtacaaggtgccctccaagaagttcaaggtgttgggaaacaccgacaggcacagcataaagaagaatttgatcggtgccctcctcttcgactccggagagaccgctgaggctaccaggctcaagaggaccgctagaaggcgctacaccagaaggaagaacagaatctgctacctgcaggagatcttctccaacgagatggccaaggtggacgactccttcttccaccgccttgaggaatcattcctggtggaggaggataaaaagcacgagagacacccaatcttcgggaacatcgtcgacgaggtggcctaccatgaaaagtaccctaccatctaccacctgaggaagaagctggtcgactctaccgacaaggctgacttgcgcttgatttacctggctctcgctcacatgataaagttccgcggacacttcctcattgagggagacctgaacccagacaactccgacgtggacaagctcttcatccagctcgttcagacctacaaccagcttttcgaggagaacccaatcaacgccagtggagttgacgccaaggctatcctctctgctcgtctgtcaaagtccaggaggcttgagaacttgattgcccagctgcctggcgaaaagaagaacggactgttcggaaacttgatcgctctctccctgggattgactcccaacttcaagtccaacttcgacctcgccgaggacgctaagttgcagttgtctaaagacacctacgacgatgacctcgacaacttgctggcccagataggcgaccaatacgccgatctcttcctcgccgctaagaacttgtccgacgcaatcctgctgtccgacatcctgagagtcaacactgagattaccaaagctcctctgtctgcttccatgattaagcgctacgacgagcaccaccaagatctgaccctgctcaaggccctggtgagacagcagctgcccgagaagtacaaggagatctttttcgaccagtccaagaacggctacgccggatacattgacggaggcgcctcccaggaagagttctacaagttcatcaagcccatccttgagaagatggacggtaccgaggagctgttggtgaagttgaacagagaggacctgttgaggaagcagagaaccttcgacaacggaagcatccctcaccaaatccacctgggagagctccacgccatcttgaggaggcaggaggatttctatcccttcctgaaggacaaccgcgagaagattgagaagatcttgaccttcagaattccttactacgtcgggccactcgccagaggaaactctaggttcgcctggatgacccgcaaatctgaagagaccattactccctggaacttcgaggaagtcgtggacaagggcgcttccgctcagtctttcatcgagaggatgaccaacttcgataaaaatctgcccaacgagaaggtgctgcccaagcactccctgttgtacgagtatttcacagtgtacaacgagctcaccaaggtgaagtacgtcacagagggaatgaggaagcctgccttcttgtccggagagcagaagaaggccatcgtcgacctgctcttcaagaccaacaggaaggtgactgtcaagcagctgaaggaggactacttcaagaagatcgagtgcttcgactccgtcgagatctctggtgtcgaggacaggttcaacgcctcccttgggacttaccacgatctgctcaagattattaaagacaaggacttcctggacaacgaggagaacgaggacatccttgaggacatcgtgctcaccctgaccttgttcgaagacagggaaatgatcgaagagaggctcaagacctacgcccacctcttcgacgacaaggtgatgaaacagctgaagagacgcagatataccggctggggaaggctctcccgcaaattgatcaacgggatcagggacaagcagtcagggaagactatactcgacttcctgaagtccgacggattcgccaacaggaacttcatgcagctcattcacgacgactccttgaccttcaaggaggacatccagaaggctcaggtgtctggacagggtgactccttgcatgagcacattgctaacttggccggctctcccgctattaagaagggcattttgcagaccgtgaaggtcgttgacgagctcgtgaaggtgatgggacgccacaagccagagaacatcgttattgagatggctcgcgagaaccaaactacccagaaagggcagaagaattcccgcgagaggatgaagcgcattgaggagggcataaaagagcttggctctcagatcctcaaggagcaccccgtcgagaacactcagctgcagaacgagaagctgtacctgtactacctccaaaacggaagggacatgtacgtggaccaggagctggacatcaacaggttgtccgactacgacgtcgaccacatcgtgcctcagtccttcctgaaggatgactccatcgacaataaagtgctgacacgctccgataaaaatagaggcaagtccgacaacgtcccctccgaggaggtcgtgaagaagatgaaaaactactggagacagctcttgaacgccaagctcatcacccagcgtaagttcgacaacctgactaaggctgagagaggaggattgtccgagctcgataaggccggattcatcaagagacagctcgtcgaaacccgccaaattaccaagcacgtggcccaaattctggattcccgcatgaacaccaagtacgatgaaaatgacaagctgatccgcgaggtcaaggtgatcaccttgaagtccaagctggtctccgacttccgcaaggacttccagttctacaaggtgagggagatcaacaactaccaccacgcacacgacgcctacctcaacgctgtcgttggaaccgccctcatcaaaaaatatcctaagctggagtctgagttcgtctacggcgactacaaggtgtacgacgtgaggaagatgatcgctaagtctgagcaggagatcggcaaggccaccgccaagtacttcttctactccaacatcatgaacttcttcaagaccgagatcactctcgccaacggtgagatcaggaagcgcccactgatcgagaccaacggtgagactggagagatcgtgtgggacaaagggagggatttcgctactgtgaggaaggtgctctccatgcctcaggtgaacatcgtcaagaagaccgaagttcagaccggaggattctccaaggagtccatcctccccaagagaaactccgacaagctgatcgctagaaagaaagactgggaccctaagaagtacggaggcttcgattctcctaccgtggcctactctgtgctggtcgtggccaaggtggagaagggcaagtccaagaagctgaaatccgtcaaggagctcctcgggattaccatcatggagaggagttccttcgagaagaaccctatcgacttcctggaggccaagggatataaagaggtgaagaaggacctcatcatcaagctgcccaagtactccctcttcgagttggagaacggaaggaagaggatgctggcttctgccggagagttgcagaagggaaatgagctcgcccttccctccaagtacgtgaacttcctgtacctcgcctctcactatgaaaagttgaagggctctcctgaggacaacgagcagaagcagctcttcgtggagcagcacaagcactacctggacgaaattatcgagcagatctctgagttctccaagcgcgtgatattggccgacgccaacctcgacaaggtgctgtccgcctacaacaagcacagggataagcccattcgcgagcaggctgaaaacattatccacctgtttaccctcacaaacttgggagcccctgctgccttcaagtacttcgacaccaccattgacaggaagagatacacctccaccaaggaggtgctcgacgcaacactcatccaccaatccatcaccggcctctatgaaacaaggattgacttgtcccagctgggaggcgactctagagccgatcccaagaagaagagaaaggtgtaggttaacctagacttgtccatcttctggattggccaacttaattaatgtatgaaataaaaggatgcacacatagtgacatgctaatcactataatgtgggcatcaaagttgtgtgttatgtgtaattactagttatctgaataaaagagaaagagatcatccatatttcttatcctaaatgaatgtcacgtgtctttataattctttgatgaaccagatgcatttcattaaccaaatccatatacatataaatattaatcatatataattaatatcaattgggttagcaaaacaaatctagtctaggtgtgttttgcgaattcgatatcaagcttatcgataccgtcgagggggggcccggtaccgg

SEQ ID NO: 299 - DNA, 5686 bp, Artificial sequence
  DD20HR1-SAMS:HPT-DD20HR2
cgcgcctctagttgaagacacgttcatgtcttcatcgtaagaagacactcagtagtcttcggccagaatggccatctggattcagcaggcctagaaggccatttaaatcctgaggatctggtcttcctaaggacccgggatatcgctatcaactttgtatagaaaagttgggccgaattcgagctcggtacggccagaatccggtaagtgactagggtcacgtgaccctagtcacttaaattcggccagaatggccatctggattcagcaggcctagaaggcccggaccgattaaactttaattcggtccgggttacctcgagcctagtaataattacacatctaagatatccccttctttttcaagtaaaataatatcatatgatctcattttagtgaaacaatactatttccctgataactctcttcaacattagggacttcatctaatcatctactttcaaggtataactagacgtatttgttcttttaaaaaaaacactagatgtactcgtcaactcaaaattcatcgttcatgcattttaattaaactttaattagctaatgagtagaaaaagatcatacgagtaaaatagaagaatcttcctagattttggaagaatggattggagtgtaagtgaattgatccattagtggaagatgctctttacaatggccaaactgttctaattgttagagcacatttgagatgaaacacttcagtagtggaggtaacctacaatcctaggatctgtatcctctatcactaatggagcaatgggtttgagattgacttactcctttccttgtctctcgtagtgcatatgcgcactttcaaaggctacacaaaagccgttaactttttgtttatttaagttacgaaagatagttgaattagagtaaatggtgatattgaattaggattttaaataattttaaaagaatttttttaataaaaaaaatattgtgttgttggatcaaaatttttaaataacatgaataaggaaatggattgcaatgaggttttaaacaattattttaacatataggattttagaaagacttttataatattttgttgaagtttagattttaatatatttatgttttaaaattttaaaaaaaacttcatgaatttataatatttgaaaaagacacgtgaatatttagaaaacatttaaaattacaataataaatcataatgagatagggtgtattcatgtgtagacgagacaccaagtatatggttcacaagtgaatcatcttttttttttacagcacaagtagatcacttgtacttatcaaaattcggaactgacacacactagtggtcacctaagtgactagggtcacgtgaccctagtcacttattcccaaacactagtaacggccgccagtgtgctggaattcgcccttcccaagctttgctctagatcaaactcacatccaaacataacatggatatcttccttaccaatcatactaattattttgggttaaatattaatcattatttttaagatattaattaagaaattaaaagattttttaaaaaaatgtataaaattatattattcatgatttttcatacatttgattttgataataaatatattttttttaatttcttaaaaaatgttgcaagacacttattagacatagtcttgttctgtttacaaaagcattcatcatttaatacattaaaaaatatttaatactaacagtagaatcttcttgtgagtggtgtgggagtaggcaacctggcattgaaacgagagaaagagagtcagaaccagaagacaaataaaaagtatgcaacaaacaaatcaaaatcaaagggcaaaggctggggttggctcaattggttgctacattcaattttcaactcagtcaacggttgagattcactctgacttccccaatctaagccgcggatgcaaacggttgaatctaacccacaatccaatctcgttacttaggggcttttccgtcattaactcacccctgccacccggtttccctataaattggaactcaatgctcccctctaaactcgtatcgcttcagagttgagaccaagacacactcgttcatatatctctctgctcttctcttctcttctacctctcaaggtacttttcttctccctctaccaaatcctagattccgtggttcaatttcggatcttgcacttctggtttgctttgccttgctttttcctcaactgggtccatctaggatccatgtgaaactctactctttctttaatatctgcggaatacgcgtttgactttcagatctagtcgaaatcatttcataattgcctttctttcttttagcttatgagaaataaaatcactttttttttatttcaaaataaaccttgggccttgtgctgactgagatggggtttggtgattacagaattttagcgaattttgtaattgtacttgtttgtctgtagttttgttttgttttcttgtttctcatacattccttaggcttcaattttattcgagtataggtcacaataggaattcaaactttgagcaggggaattaatcccttccttcaaatccagtttgtttgtatatatgtttaaaaaatgaaacttttgctttaaattctattataactttttttatggctgaaatttttgcatgtgtctttgctctctgttgtaaatttactgtttaggtactaactctaggcttgttgtgcagtttttgaagtataacaacagaagttcctattccgaagttcctattctctagaaagtataggaacttccactagtccatgaaaaagcctgaactcaccgcgacgtctgtcgagaagtttctgatcgaaaagttcgacagcgtctccgacctgatgcagctctcggagggcgaagaatctcgtgctttcagcttcgatgtaggagggcgtggatatgtcctgcgggtaaatagctgcgccgatggtttctacaaagatcgttatgtttatcggcactttgcatcggccgcgctcccgattccggaagtgcttgacattggggaattcagcgagagcctgacctattgcatctcccgccgtgcacagggtgtcacgttgcaagacctgcctgaaaccgaactgcccgctgttctgcagccggtcgcggaggccatggatgcgatcgctgcggccgatcttagccagacgagcgggttcggcccattcggaccgcaaggaatcggtcaatacactacatggcgtgatttcatatgcgcgattgctgatccccatgtgtatcactggcaaactgtgatggacgacaccgtcagtgcgtccgtcgcgcaggctctcgatgagctgatgctttgggccgaggactgccccgaagtccggcacctcgtgcacgcggatttcggctccaacaatgtcctgacggacaatggccgcataacagcggtcattgactggagcgaggcgatgttcggggattcccaatacgaggtcgccaacatcttcttctggaggccgtggttggcttgtatggagcagcagacgcgctacttcgagcggaggcatccggagcttgcaggatcgccgcggctccgggcgtatatgctccgcattggtcttgaccaactctatcagagcttggttgacggcaatttcgatgatgcagcttgggcgcagggtcgatgcgacgcaatcgtccgatccggagccgggactgtcgggcgtacacaaatcgcccgcagaagcgcggccgtctggaccgatggctgtgtagaagtactcgccgatagtggaaaccgacgccccagcactcgtccgagggcaaaggaatagtgaggtacctaaagaaggagtgcgtcgaagcagatcgttcaaacatttggcaataaagtttcttaagattgaatcctgttgccggtcttgcgatgattatcatataatttctgttgaattacgttaagcatgtaataattaacatgtaatgcatgacgttatttatgagatgggtttttatgattagagtcccgcaattatacatttaatacgcgatagaaaacaaaatatagcgcgcaaactaggataaattatcgcgcgcggtgtcatctatgttactagatcgatgtcgacccgggccctaggaggccggcccagctgatgatcccggtgaagttcctattccgaagttcctattctccagaaagtataggaacttcactagagcttgcggccgcgcatgctgacttaatcagctaacgccactcgacctgcaggcatgcccgcggatatcgatgggccccggccgaagcttcaagtttgtacaaaaaagcaggctggcgccggaaccaattcagtcgactggatccggtaccgaattcgcggccgcactcgagatatctagacccagctttcttgtacaaagtggccgttaacggatcggccagaatccggtaagtgactagggtcacgtgaccctagtcacttaaattcggccagaatggccatctggattcagcaggcctagaaggcccggaccgattaaactttaattcggtccgggttacctctagaaagcttgtcgacctgcagacacgacatgatggaacgtgactaaggtgggtttttgactttgcatgtcgaagtgagagtgattttattgagagaataatagaagacctacaaaacaaatgatcccgacgctaaagtaagtacgagagttaagagaataaatgggaaaatatgcatacatgattaggtgtgtgttcgtctcaagaaagtacgaatgaatatggtgtgtttgtagtacatgaatgatgtgttttgagggttcaagggaaattgatatttatagagtgaaatggaaccagaggtctttgttgacaagggttgttatgactcttgcaaataattaatagcttataaataatagccaataacttattatagatagagttagagataatatatagctaaatttgaacaaggcatacaaaacaaaaatgctaaatatgaataagacaatcaaaattgtagtcgatgttcaactctttgtcgttgaagaacttgtttgcagtggtatagtaaatgggtgtgagtgcagtgtctcacccatctcacaccacacaaccaacttcatatctaaagatattgtcgctgaatacaaaattgagttatggaatatacaattcataatatagatacgaaaaatcatttcttacaaaacattcaatcaaaaattattcaaacataattctagattaagtaatccgaagtacaagttagtatcctagatccgttaatttaaaattatgtttgcataattttggatttggtgttctataagggcacaattttgttcattcttacaagtttgtcaattctaaaatatatgcaaatttgaagaaaaaaaatttacgaatgtgtctcaaacaataacttaatgggaggagaatgagggatgaagaagctcaaaattaccaacgccttctacctcaagaagctacttcacacaaaatatgactggcggaaggataggggacaaccgataacgagaaggagatacataaggtaatgtacgttgttgtgtgagggatccggtcacctaagtgactagggtcacgtgaccctagtcacttattcccgggcaactttattatacaaagttgatagatctcgaattcattccgattaatcgtgg

SEQ ID NO: 300 - DNA, 6611 bp, Artificial sequence
  U6-9.1-DD20CR2+EF1A2-CAS9
cgcgccggtacccgggttaagagaattgtaagtgtgcttttatatatttaaaattaatatattttgaaatgttaaaatataaaagaaaattcaatgtaaattaaaaataaataaatgtttaataaagataaattttaaaacataaaagaaaatgtctaacaagaggattaagatcctgtgctcttaaatttttaggtgttgaaatcttagccatacaaaatatattttattaaaaccaagcatgaaaaaagtcactaaagagctatataactcatgcagctagaaatgaagtgaagggaatccagtttgttctcagtcgaaagagtgtctatctttgttcttttctgcaaccgagttaagcaaaatgggaatgcgaggtatcttcctttcgttaggggagcaccagatgcatagttagtcccacattgatgaatataacaagagcttcacagaatatatagcccaggccacagtaaaagcttgacatgatggaacgtgactagttttagagctagaaatagcaagttaaaataaggctagtccgttatcaacttgaaaaagtggcaccgagtcggtgcttttttttgcggccgcaattggatcgggtttacttattttgtgggtatctatacttttattagatttttaatcaggctcctgatttctttttatttcgattgaattcctgaacttgtattattcagtagatcgaataaattataaaaagataaaatcataaaataatattttatcctatcaatcatattaaagcaatgaatatgtaaaattaatcttatctttattttaaaaaatcatataggtttagtatttttttaaaaataaagataggattagttttactattcactgcttattacttttaaaaaaatcataaaggtttagtatttttttaaaataaatataggaatagttttactattcactgctttaatagaaaaatagtttaaaatttaagatagttttaatcccagcatttgccacgtttgaacgtgagccgaaacgatgtcgttacattatcttaacctagctgaaacgatgtcgtcataatatcgccaaatgccaactggactacgtcgaacccacaaatcccacaaagcgcgtgaaatcaaatcgctcaaaccacaaaaaagaacaacgcgtttgttacacgctcaatcccacgcgagtagagcacagtaaccttcaaataagcgaatggggcataatcagaaatccgaaataaacctaggggcattatcggaaatgaaaagtagctcactcaatataaaaatctaggaaccctagttttcgttatcactctgtgctccctcgctctatttctcagtctctgtgtttgcggctgaggattccgaacgagtgaccttcttcgtttctcgcaaaggtaacagcctctgctcttgtctcttcgattcgatctatgcctgtctcttatttacgatgatgtttcttcggttatgtttttttatttatgctttatgctgttgatgttcggttgtttgtttcgctttgtttttgtggttcagttttttaggattcttttggtttttgaatcgattaatcggaagagattttcgagttatttggtgtgttggaggtgaatcttttttttgaggtcatagatctgttgtatttgtgttataaacatgcgactttgtatgattttttacgaggttatgatgttctggttgttttattatgaatctgttgagacagaaccatgatttttgttgatgttcgtttacactattaaaggtttgttttaacaggattaaaagttttttaagcatgttgaaggagtcttgtagatatgtaaccgtcgatagtttttttgtgggtttgttcacatgttatcaagcttaatcttttactatgtatgcgaccatatctggatccagcaaaggcgattttttaattccttgtgaaacttttgtaatatgaagttgaaattttgttattggtaaactataaatgtgtgaagttggagtatacctttaccttcttatttggctttgtgatagtttaatttatatgtattttgagttctgacttgtatttctttgaattgattctagtttaagtaatccatggacaaaaagtactcaatagggctcgacatagggactaactccgttggatgggccgtcatcaccgacgagtacaaggtgccctccaagaagttcaaggtgttgggaaacaccgacaggcacagcataaagaagaatttgatcggtgccctcctcttcgactccggagagaccgctgaggctaccaggctcaagaggaccgctagaaggcgctacaccagaaggaagaacagaatctgctacctgcaggagatcttctccaacgagatggccaaggtggacgactccttcttccaccgccttgaggaatcattcctggtggaggaggataaaaagcacgagagacacccaatcttcgggaacatcgtcgacgaggtggcctaccatgaaaagtaccctaccatctaccacctgaggaagaagctggtcgactctaccgacaaggctgacttgcgcttgatttacctggctctcgctcacatgataaagttccgcggacacttcctcattgagggagacctgaacccagacaactccgacgtggacaagctcttcatccagctcgttcagacctacaaccagcttttcgaggagaacccaatcaacgccagtggagttgacgccaaggctatcctctctgctcgtctgtcaaagtccaggaggcttgagaacttgattgcccagctgcctggcgaaaagaagaacggactgttcggaaacttgatcgctctctccctgggattgactcccaacttcaagtccaacttcgacctcgccgaggacgctaagttgcagttgtctaaagacacctacgacgatgacctcgacaacttgctggcccagataggcgaccaatacgccgatctcttcctcgccgctaagaacttgtccgacgcaatcctgctgtccgacatcctgagagtcaacactgagattaccaaagctcctctgtctgcttccatgattaagcgctacgacgagcaccaccaagatctgaccctgctcaaggccctggtgagacagcagctgcccgagaagtacaaggagatctttttcgaccagtccaagaacggctacgccggatacattgacggaggcgcctcccaggaagagttctacaagttcatcaagcccatccttgagaagatggacggtaccgaggagctgttggtgaagttgaacagagaggacctgttgaggaagcagagaaccttcgacaacggaagcatccctcaccaaatccacctgggagagctccacgccatcttgaggaggcaggaggatttctatcccttcctgaaggacaaccgcgagaagattgagaagatcttgaccttcagaattccttactacgtcgggccactcgccagaggaaactctaggttcgcctggatgacccgcaaatctgaagagaccattactccctggaacttcgaggaagtcgtggacaagggcgcttccgctcagtctttcatcgagaggatgaccaacttcgataaaaatctgcccaacgagaaggtgctgcccaagcactccctgttgtacgagtatttcacagtgtacaacgagctcaccaaggtgaagtacgtcacagagggaatgaggaagcctgccttcttgtccggagagcagaagaaggccatcgtcgacctgctcttcaagaccaacaggaaggtgactgtcaagcagctgaaggaggactacttcaagaagatcgagtgcttcgactccgtcgagatctctggtgtcgaggacaggttcaacgcctcccttgggacttaccacgatctgctcaagattattaaagacaaggacttcctggacaacgaggagaacgaggacatccttgaggacatcgtgctcaccctgaccttgttcgaagacagggaaatgatcgaagagaggctcaagacctacgcccacctcttcgacgacaaggtgatgaaacagctgaagagacgcagatataccggctggggaaggctctcccgcaaattgatcaacgggatcagggacaagcagtcagggaagactatactcgacttcctgaagtccgacggattcgccaacaggaacttcatgcagctcattcacgacgactccttgaccttcaaggaggacatccagaaggctcaggtgtctggacagggtgactccttgcatgagcacattgctaacttggccggctctcccgctattaagaagggcattttgcagaccgtgaaggtcgttgacgagctcgtgaaggtgatgggacgccacaagccagagaacatcgttattgagatggctcgcgagaaccaaactacccagaaagggcagaagaattcccgcgagaggatgaagcgcattgaggagggcataaaagagcttggctctcagatcctcaaggagcaccccgtcgagaacactcagctgcagaacgagaagctgtacctgtactacctccaaaacggaagggacatgtacgtggaccaggagctggacatcaacaggttgtccgactacgacgtcgaccacatcgtgcctcagtccttcctgaaggatgactccatcgacaataaagtgctgacacgctccgataaaaatagaggcaagtccgacaacgtcccctccgaggaggtcgtgaagaagatgaaaaactactggagacagctcttgaacgccaagctcatcacccagcgtaagttcgacaacctgactaaggctgagagaggaggattgtccgagctcgataaggccggattcatcaagagacagctcgtcgaaacccgccaaattaccaagcacgtggcccaaattctggattcccgcatgaacaccaagtacgatgaaaatgacaagctgatccgcgaggtcaaggtgatcaccttgaagtccaagctggtctccgacttccgcaaggacttccagttctacaaggtgagggagatcaacaactaccaccacgcacacgacgcctacctcaacgctgtcgttggaaccgccctcatcaaaaaatatcctaagctggagtctgagttcgtctacggcgactacaaggtgtacgacgtgaggaagatgatcgctaagtctgagcaggagatcggcaaggccaccgccaagtacttcttctactccaacatcatgaacttcttcaagaccgagatcactctcgccaacggtgagatcaggaagcgcccactgatcgagaccaacggtgagactggagagatcgtgtgggacaaagggagggatttcgctactgtgaggaaggtgctctccatgcctcaggtgaacatcgtcaagaagaccgaagttcagaccggaggattctccaaggagtccatcctccccaagagaaactccgacaagctgatcgctagaaagaaagactgggaccctaagaagtacggaggcttcgattctcctaccgtggcctactctgtgctggtcgtggccaaggtggagaagggcaagtccaagaagctgaaatccgtcaaggagctcctcgggattaccatcatggagaggagttccttcgagaagaaccctatcgacttcctggaggccaagggatataaagaggtgaagaaggacctcatcatcaagctgcccaagtactccctcttcgagttggagaacggaaggaagaggatgctggcttctgccggagagttgcagaagggaaatgagctcgcccttccctccaagtacgtgaacttcctgtacctcgcctctcactatgaaaagttgaagggctctcctgaggacaacgagcagaagcagctcttcgtggagcagcacaagcactacctggacgaaattatcgagcagatctctgagttctccaagcgcgtgatattggccgacgccaacctcgacaaggtgctgtccgcctacaacaagcacagggataagcccattcgcgagcaggctgaaaacattatccacctgtttaccctcacaaacttgggagcccctgctgccttcaagtacttcgacaccaccattgacaggaagagatacacctccaccaaggaggtgctcgacgcaacactcatccaccaatccatcaccggcctctatgaaacaaggattgacttgtcccagctgggaggcgactctagagccgatcccaagaagaagagaaaggtgtaggttaacctagacttgtccatcttctggattggccaacttaattaatgtatgaaataaaaggatgcacacatagtgacatgctaatcactataatgtgggcatcaaagttgtgtgttatgtgtaattactagttatctgaataaaagagaaagagatcatccatatttcttatcctaaatgaatgtcacgtgtctttataattctttgatgaaccagatgcatttcattaaccaaatccatatacatataaatattaatcatatataattaatatcaattgggttagcaaaacaaatctagtctaggtgtgttttgcgaattcgatatcaagcttatcgataccgtcgagggggggcccggtaccgg

SEQ ID NO: 301 - DNA, 6611 bp, Artificial sequence
  U6-9.1:DD43CR1+EF1A2:CAS9
cgcgccggtacccgggttaagagaattgtaagtgtgcttttatatatttaaaattaatatattttgaaatgttaaaatataaaagaaaattcaatgtaaattaaaaataaataaatgtttaataaagataaattttaaaacataaaagaaaatgtctaacaagaggattaagatcctgtgctcttaaatttttaggtgttgaaatcttagccatacaaaatatattttattaaaaccaagcatgaaaaaagtcactaaagagctatataactcatgcagctagaaatgaagtgaagggaatccagtttgttctcagtcgaaagagtgtctatctttgttcttttctgcaaccgagttaagcaaaatgggaatgcgaggtatcttcctttcgttaggggagcaccagatgcatagttagtcccacattgatgaatataacaagagcttcacagaatatatagcccaggccacagtaaaagcttgtcccttgtacttgtacgtagttttagagctagaaatagcaagttaaaataaggctagtccgttatcaacttgaaaaagtggcaccgagtcggtgcttttttttgcggccgcaattggatcgggtttacttattttgtgggtatctatacttttattagatttttaatcaggctcctgatttctttttatttcgattgaattcctgaacttgtattattcagtagatcgaataaattataaaaagataaaatcataaaataatattttatcctatcaatcatattaaagcaatgaatatgtaaaattaatcttatctttattttaaaaaatcatataggtttagtatttttttaaaaataaagataggattagttttactattcactgcttattacttttaaaaaaatcataaaggtttagtatttttttaaaataaatataggaatagttttactattcactgctttaatagaaaaatagtttaaaatttaagatagttttaatcccagcatttgccacgtttgaacgtgagccgaaacgatgtcgttacattatcttaacctagctgaaacgatgtcgtcataatatcgccaaatgccaactggactacgtcgaacccacaaatcccacaaagcgcgtgaaatcaaatcgctcaaaccacaaaaaagaacaacgcgtttgttacacgctcaatcccacgcgagtagagcacagtaaccttcaaataagcgaatggggcataatcagaaatccgaaataaacctaggggcattatcggaaatgaaaagtagctcactcaatataaaaatctaggaaccctagttttcgttatcactctgtgctccctcgctctatttctcagtctctgtgtttgcggctgaggattccgaacgagtgaccttcttcgtttctcgcaaaggtaacagcctctgctcttgtctcttcgattcgatctatgcctgtctcttatttacgatgatgtttcttcggttatgtttttttatttatgctttatgctgttgatgttcggttgtttgtttcgctttgtttttgtggttcagttttttaggattcttttggtttttgaatcgattaatcggaagagattttcgagttatttggtgtgttggaggtgaatcttttttttgaggtcatagatctgttgtatttgtgttataaacatgcgactttgtatgattttttacgaggttatgatgttctggttgttttattatgaatctgttgagacagaaccatgatttttgttgatgttcgtttacactattaaaggtttgttttaacaggattaaaagttttttaagcatgttgaaggagtcttgtagatatgtaaccgtcgatagtttttttgtgggtttgttcacatgttatcaagcttaatcttttactatgtatgcgaccatatctggatccagcaaaggcgattttttaattccttgtgaaacttttgtaatatgaagttgaaattttgttattggtaaactataaatgtgtgaagttggagtatacctttaccttcttatttggctttgtgatagtttaatttatatgtattttgagttctgacttgtatttctttgaattgattctagtttaagtaatccatggacaaaaagtactcaatagggctcgacatagggactaactccgttggatgggccgtcatcaccgacgagtacaaggtgccctccaagaagttcaaggtgttgggaaacaccgacaggcacagcataaagaagaatttgatcggtgccctcctcttcgactccggagagaccgctgaggctaccaggctcaagaggaccgctagaaggcgctacaccagaaggaagaacagaatctgctacctgcaggagatcttctccaacgagatggccaaggtggacgactccttcttccaccgccttgaggaatcattcctggtggaggaggataaaaagcacgagagacacccaatcttcgggaacatcgtcgacgaggtggcctaccatgaaaagtaccctaccatctaccacctgaggaagaagctggtcgactctaccgacaaggctgacttgcgcttgatttacctggctctcgctcacatgataaagttccgcggacacttcctcattgagggagacctgaacccagacaactccgacgtggacaagctcttcatccagctcgttcagacctacaaccagcttttcgaggagaacccaatcaacgccagtggagttgacgccaaggctatcctctctgctcgtctgtcaaagtccaggaggcttgagaacttgattgcccagctgcctggcgaaaagaagaacggactgttcggaaacttgatcgctctctccctgggattgactcccaacttcaagtccaacttcgacctcgccgaggacgctaagttgcagttgtctaaagacacctacgacgatgacctcgacaacttgctggcccagataggcgaccaatacgccgatctcttcctcgccgctaagaacttgtccgacgcaatcctgctgtccgacatcctgagagtcaacactgagattaccaaagctcctctgtctgcttccatgattaagcgctacgacgagcaccaccaagatctgaccctgctcaaggccctggtgagacagcagctgcccgagaagtacaaggagatctttttcgaccagtccaagaacggctacgccggatacattgacggaggcgcctcccaggaagagttctacaagttcatcaagcccatccttgagaagatggacggtaccgaggagctgttggtgaagttgaacagagaggacctgttgaggaagcagagaaccttcgacaacggaagcatccctcaccaaatccacctgggagagctccacgccatcttgaggaggcaggaggatttctatcccttcctgaaggacaaccgcgagaagattgagaagatcttgaccttcagaattccttactacgtcgggccactcgccagaggaaactctaggttcgcctggatgacccgcaaatctgaagagaccattactccctggaacttcgaggaagtcgtggacaagggcgcttccgctcagtctttcatcgagaggatgaccaacttcgataaaaatctgcccaacgagaaggtgctgcccaagcactccctgttgtacgagtatttcacagtgtacaacgagctcaccaaggtgaagtacgtcacagagggaatgaggaagcctgccttcttgtccggagagcagaagaaggccatcgtcgacctgctcttcaagaccaacaggaaggtgactgtcaagcagctgaaggaggactacttcaagaagatcgagtgcttcgactccgtcgagatctctggtgtcgaggacaggttcaacgcctcccttgggacttaccacgatctgctcaagattattaaagacaaggacttcctggacaacgaggagaacgaggacatccttgaggacatcgtgctcaccctgaccttgttcgaagacagggaaatgatcgaagagaggctcaagacctacgcccacctcttcgacgacaaggtgatgaaacagctgaagagacgcagatataccggctggggaaggctctcccgcaaattgatcaacgggatcagggacaagcagtcagggaagactatactcgacttcctgaagtccgacggattcgccaacaggaacttcatgcagctcattcacgacgactccttgaccttcaaggaggacatccagaaggctcaggtgtctggacagggtgactccttgcatgagcacattgctaacttggccggctctcccgctattaagaagggcattttgcagaccgtgaaggtcgttgacgagctcgtgaaggtgatgggacgccacaagccagagaacatcgttattgagatggctcgcgagaaccaaactacccagaaagggcagaagaattcccgcgagaggatgaagcgcattgaggagggcataaaagagcttggctctcagatcctcaaggagcaccccgtcgagaacactcagctgcagaacgagaagctgtacctgtactacctccaaaacggaagggacatgtacgtggaccaggagctggacatcaacaggttgtccgactacgacgtcgaccacatcgtgcctcagtccttcctgaaggatgactccatcgacaataaagtgctgacacgctccgataaaaatagaggcaagtccgacaacgtcccctccgaggaggtcgtgaagaagatgaaaaactactggagacagctcttgaacgccaagctcatcacccagcgtaagttcgacaacctgactaaggctgagagaggaggattgtccgagctcgataaggccggattcatcaagagacagctcgtcgaaacccgccaaattaccaagcacgtggcccaaattctggattcccgcatgaacaccaagtacgatgaaaatgacaagctgatccgcgaggtcaaggtgatcaccttgaagtccaagctggtctccgacttccgcaaggacttccagttctacaaggtgagggagatcaacaactaccaccacgcacacgacgcctacctcaacgctgtcgttggaaccgccctcatcaaaaaatatcctaagctggagtctgagttcgtctacggcgactacaaggtgtacgacgtgaggaagatgatcgctaagtctgagcaggagatcggcaaggccaccgccaagtacttcttctactccaacatcatgaacttcttcaagaccgagatcactctcgccaacggtgagatcaggaagcgcccactgatcgagaccaacggtgagactggagagatcgtgtgggacaaagggagggatttcgctactgtgaggaaggtgctctccatgcctcaggtgaacatcgtcaagaagaccgaagttcagaccggaggattctccaaggagtccatcctccccaagagaaactccgacaagctgatcgctagaaagaaagactgggaccctaagaagtacggaggcttcgattctcctaccgtggcctactctgtgctggtcgtggccaaggtggagaagggcaagtccaagaagctgaaatccgtcaaggagctcctcgggattaccatcatggagaggagttccttcgagaagaaccctatcgacttcctggaggccaagggatataaagaggtgaagaaggacctcatcatcaagctgcccaagtactccctcttcgagttggagaacggaaggaagaggatgctggcttctgccggagagttgcagaagggaaatgagctcgcccttccctccaagtacgtgaacttcctgtacctcgcctctcactatgaaaagttgaagggctctcctgaggacaacgagcagaagcagctcttcgtggagcagcacaagcactacctggacgaaattatcgagcagatctctgagttctccaagcgcgtgatattggccgacgccaacctcgacaaggtgctgtccgcctacaacaagcacagggataagcccattcgcgagcaggctgaaaacattatccacctgtttaccctcacaaacttgggagcccctgctgccttcaagtacttcgacaccaccattgacaggaagagatacacctccaccaaggaggtgctcgacgcaacactcatccaccaatccatcaccggcctctatgaaacaaggattgacttgtcccagctgggaggcgactctagagccgatcccaagaagaagagaaaggtgtaggttaacctagacttgtccatcttctggattggccaacttaattaatgtatgaaataaaaggatgcacacatagtgacatgctaatcactataatgtgggcatcaaagttgtgtgttatgtgtaattactagttatctgaataaaagagaaagagatcatccatatttcttatcctaaatgaatgtcacgtgtctttataattctttgatgaaccagatgcatttcattaaccaaatccatatacatataaatattaatcatatataattaatatcaattgggttagcaaaacaaatctagtctaggtgtgttttgcgaattcgatatcaagcttatcgataccgtcgagggggggcccggtaccgg

SEQ ID NO: 302 - DNA, 5719 bp, Artificial sequence
  DD43HR1-SAMS:HPT-DD43HR2
cgcgcctctagttgaagacacgttcatgtcttcatcgtaagaagacactcagtagtcttcggccagaatggccatctggattcagcaggcctagaaggccatttaaatcctgaggatctggtcttcctaaggacccgggatatcgctatcaactttgtatagaaaagttgggccgaattcgagctcggtacggccagaatccggtaagtgactagggtcacgtgaccctagtcacttaaattcggccagaatggccatctggattcagcaggcctagaaggcccggaccgattaaactttaattcggtccgggttacctcgagatcttgttcccctccttggtttggcataaattgattttcatggctcttctcggtcgaaactggagctaattcacccttagtctctcttaaaattctggctgtaagaaacaccacagaacacataaattataaactaattataatttgaagagtaaaatatgtttttactcttatgatttaattagtgtagttttaattttctcctttttttaaaaaattttggtattcataaatttcaattttttaaaaataattgttgttacccgttaatgataacgggatatgttatgttaccactaaatcggacaaaaaaaattcaaaacttttataaggattaaaattaacaaaaatattttaaaaaaatctaacctcaataaagttaaatttataagcacaaaataatacttttaagcctaatttggcaagacacaagcaagctcacctgtagcattaatagaaaggaagcaaagcaagagaaaagcaaccagaaggaagcgtttgcttggtgacacagccatcttacttgaatttatggtattactgagaaaccttgatcttgcttcaaaatcttctagttaccctctttttataggcagaaagagaactagctagttgccaataggatatgaggacatgtggtgcaatgcactcactcttcaaggacaagaaaaacaatggctacaattgtggttcaaatcaatgtctcctgctctgtcctgcctgaaaatgacacccttttgcttggaaaagaggatcaaagctaagaacaggagtggcttcattcccttcatgtaaccaaacactttcgcattctgtcattcgtgaatcagcaaaatctgcaaccaaaaatatatggtgcctaaataaaagaaataaaataatttagagttgcggactaaaataataaacaaaagaaatatattataatctagaattaatttaggactaaaagaagaggcagactccaattcctcttttctagaataccctccgtacgtacactagtggtcacctaagtgactagggtcacgtgaccctagtcacttattcccaaacactagtaacggccgccagtgtgctggaattcgcccttcccaagctttgctctagatcaaactcacatccaaacataacatggatatcttccttaccaatcatactaattattttgggttaaatattaatcattatttttaagatattaattaagaaattaaaagattttttaaaaaaatgtataaaattatattattcatgatttttcatacatttgattttgataataaatatattttttttaatttcttaaaaaatgttgcaagacacttattagacatagtcttgttctgtttacaaaagcattcatcatttaatacattaaaaaatatttaatactaacagtagaatcttcttgtgagtggtgtgggagtaggcaacctggcattgaaacgagagaaagagagtcagaaccagaagacaaataaaaagtatgcaacaaacaaatcaaaatcaaagggcaaaggctggggttggctcaattggttgctacattcaattttcaactcagtcaacggttgagattcactctgacttccccaatctaagccgcggatgcaaacggttgaatctaacccacaatccaatctcgttacttaggggcttttccgtcattaactcacccctgccacccggtttccctataaattggaactcaatgctcccctctaaactcgtatcgcttcagagttgagaccaagacacactcgttcatatatctctctgctcttctcttctcttctacctctcaaggtacttttcttctccctctaccaaatcctagattccgtggttcaatttcggatcttgcacttctggtttgctttgccttgctttttcctcaactgggtccatctaggatccatgtgaaactctactctttctttaatatctgcggaatacgcgtttgactttcagatctagtcgaaatcatttcataattgcctttctttcttttagcttatgagaaataaaatcactttttttttatttcaaaataaaccttgggccttgtgctgactgagatggggtttggtgattacagaattttagcgaattttgtaattgtacttgtttgtctgtagttttgttttgttttcttgtttctcatacattccttaggcttcaattttattcgagtataggtcacaataggaattcaaactttgagcaggggaattaatcccttccttcaaatccagtttgtttgtatatatgtttaaaaaatgaaacttttgctttaaattctattataactttttttatggctgaaatttttgcatgtgtctttgctctctgttgtaaatttactgtttaggtactaactctaggcttgttgtgcagtttttgaagtataacaacagaagttcctattccgaagttcctattctctagaaagtataggaacttccactagtccatgaaaaagcctgaactcaccgcgacgtctgtcgagaagtttctgatcgaaaagttcgacagcgtctccgacctgatgcagctctcggagggcgaagaatctcgtgctttcagcttcgatgtaggagggcgtggatatgtcctgcgggtaaatagctgcgccgatggtttctacaaagatcgttatgtttatcggcactttgcatcggccgcgctcccgattccggaagtgcttgacattggggaattcagcgagagcctgacctattgcatctcccgccgtgcacagggtgtcacgttgcaagacctgcctgaaaccgaactgcccgctgttctgcagccggtcgcggaggccatggatgcgatcgctgcggccgatcttagccagacgagcgggttcggcccattcggaccgcaaggaatcggtcaatacactacatggcgtgatttcatatgcgcgattgctgatccccatgtgtatcactggcaaactgtgatggacgacaccgtcagtgcgtccgtcgcgcaggctctcgatgagctgatgctttgggccgaggactgccccgaagtccggcacctcgtgcacgcggatttcggctccaacaatgtcctgacggacaatggccgcataacagcggtcattgactggagcgaggcgatgttcggggattcccaatacgaggtcgccaacatcttcttctggaggccgtggttggcttgtatggagcagcagacgcgctacttcgagcggaggcatccggagcttgcaggatcgccgcggctccgggcgtatatgctccgcattggtcttgaccaactctatcagagcttggttgacggcaatttcgatgatgcagcttgggcgcagggtcgatgcgacgcaatcgtccgatccggagccgggactgtcgggcgtacacaaatcgcccgcagaagcgcggccgtctggaccgatggctgtgtagaagtactcgccgatagtggaaaccgacgccccagcactcgtccgagggcaaaggaatagtgaggtacctaaagaaggagtgcgtcgaagcagatcgttcaaacatttggcaataaagtttcttaagattgaatcctgttgccggtcttgcgatgattatcatataatttctgttgaattacgttaagcatgtaataattaacatgtaatgcatgacgttatttatgagatgggtttttatgattagagtcccgcaattatacatttaatacgcgatagaaaacaaaatatagcgcgcaaactaggataaattatcgcgcgcggtgtcatctatgttactagatcgatgtcgacccgggccctaggaggccggcccagctgatgatcccggtgaagttcctattccgaagttcctattctccagaaagtataggaacttcactagagcttgcggccgcgcatgctgacttaatcagctaacgccactcgacctgcaggcatgcccgcggatatcgatgggccccggccgaagcttcaagtttgtacaaaaaagcaggctggcgccggaaccaattcagtcgactggatccggtaccgaattcgcggccgcactcgagatatctagacccagctttcttgtacaaagtggccgttaacggatcggccagaatccggtaagtgactagggtcacgtgaccctagtcacttaaattcggccagaatggccatctggattcagcaggcctagaaggcccggaccgattaaactttaattcggtccgggttacctctagaaagcttgtcgacctgcaggtacaagtacaagggacttgtgagttgtaaggctgtatttacaatagtgaaaagagaatcatctgggtgattgggtttttagtccccagtgacgaattaaaggtttgaattcttagtatgtttgggaatcaattaggaatttcgttttggactttccaaagcaattattcactttttcattcattaaatgtgactaaaaaattgttatttctccattggccaggatgcatcgtttatataaacataaccttagtgaaagcagtgttttcatgtgacagcggcagactatatcttaaacaaaattacttgtaaagaaagataccgttaggaaaaaaatgaaaagaaaattgaagctatcacttgtttactttcctaatatctttcaagaatacaatgtggtgaatttcaattttccctacatatgtataccgtcagcctgacgcaacttatgaaacttctctttctttcatttgatgtatatataaagacacattatatataaagaaactttatatatatctccatcatattttagtacttgctactatgtaaaattagctgttggaagtatctcaagaaacatttaatttattgaaccaagcattaaccattcatctacatttgagttctaaaataaatcttaaatgatgtggaggaagggaaattgttaattatttccctcttctcctacatggatatacctgaaacatgcaatggatggattagattttaacatttgcagcctgagaagttcactgactttcctccagctattttatgtgtgcccgccaccatttatagctcatgattgtagctgaactgcaaaaactgcatcgattgcaaactgaaattgagaatctcttttcaactttatatgctgattgatgcatgctgagcatgctatactagtactcgaagttcctatatgtagactttgttactgcctaatatactttgtgtttgttctcaagttcttattttatttcatattttttcctataaaaggttaatggctctataaaggttgagtgacggatccggtcacctaagtgactagggtcacgtgaccctagtcacttattcccgggcaactttattatacaaagttgatagatctcgaattcattccgattaatcgtgg

SEQ ID NO: 303 - DNA, 6611 bp, Artificial sequence
  U6-9.1:DD43CR2+EF1A2:CAS9
cgcgccggtacccgggttaagagaattgtaagtgtgcttttatatatttaaaattaatatattttgaaatgttaaaatataaaagaaaattcaatgtaaattaaaaataaataaatgtttaataaagataaattttaaaacataaaagaaaatgtctaacaagaggattaagatcctgtgctcttaaatttttaggtgttgaaatcttagccatacaaaatatattttattaaaaccaagcatgaaaaaagtcactaaagagctatataactcatgcagctagaaatgaagtgaagggaatccagtttgttctcagtcgaaagagtgtctatctttgttcttttctgcaaccgagttaagcaaaatgggaatgcgaggtatcttcctttcgttaggggagcaccagatgcatagttagtcccacattgatgaatataacaagagcttcacagaatatatagcccaggccacagtaaaagcttgtattctagaaaagaggaatgttttagagctagaaatagcaagttaaaataaggctagtccgttatcaacttgaaaaagtggcaccgagtcggtgcttttttttgcggccgcaattggatcgggtttacttattttgtgggtatctatacttttattagatttttaatcaggctcctgatttctttttatttcgattgaattcctgaacttgtattattcagtagatcgaataaattataaaaagataaaatcataaaataatattttatcctatcaatcatattaaagcaatgaatatgtaaaattaatcttatctttattttaaaaaatcatataggtttagtatttttttaaaaataaagataggattagttttactattcactgcttattacttttaaaaaaatcataaaggtttagtatttttttaaaataaatataggaatagttttactattcactgctttaatagaaaaatagtttaaaatttaagatagttttaatcccagcatttgccacgtttgaacgtgagccgaaacgatgtcgttacattatcttaacctagctgaaacgatgtcgtcataatatcgccaaatgccaactggactacgtcgaacccacaaatcccacaaagcgcgtgaaatcaaatcgctcaaaccacaaaaaagaacaacgcgtttgttacacgctcaatcccacgcgagtagagcacagtaaccttcaaataagcgaatggggcataatcagaaatccgaaataaacctaggggcattatcggaaatgaaaagtagctcactcaatataaaaatctaggaaccctagttttcgttatcactctgtgctccctcgctctatttctcagtctctgtgtttgcggctgaggattccgaacgagtgaccttcttcgtttctcgcaaaggtaacagcctctgctcttgtctcttcgattcgatctatgcctgtctcttatttacgatgatgtttcttcggttatgtttttttatttatgctttatgctgttgatgttcggttgtttgtttcgctttgtttttgtggttcagttttttaggattcttttggtttttgaatcgattaatcggaagagattttcgagttatttggtgtgttggaggtgaatcttttttttgaggtcatagatctgttgtatttgtgttataaacatgcgactttgtatgattttttacgaggttatgatgttctggttgttttattatgaatctgttgagacagaaccatgatttttgttgatgttcgtttacactattaaaggtttgttttaacaggattaaaagttttttaagcatgttgaaggagtcttgtagatatgtaaccgtcgatagtttttttgtgggtttgttcacatgttatcaagcttaatcttttactatgtatgcgaccatatctggatccagcaaaggcgattttttaattccttgtgaaacttttgtaatatgaagttgaaattttgttattggtaaactataaatgtgtgaagttggagtatacctttaccttcttatttggctttgtgatagtttaatttatatgtattttgagttctgacttgtatttctttgaattgattctagtttaagtaatccatggacaaaaagtactcaatagggctcgacatagggactaactccgttggatgggccgtcatcaccgacgagtacaaggtgccctccaagaagttcaaggtgttgggaaacaccgacaggcacagcataaagaagaatttgatcggtgccctcctcttcgactccggagagaccgctgaggctaccaggctcaagaggaccgctagaaggcgctacaccagaaggaagaacagaatctgctacctgcaggagatcttctccaacgagatggccaaggtggacgactccttcttccaccgccttgaggaatcattcctggtggaggaggataaaaagcacgagagacacccaatcttcgggaacatcgtcgacgaggtggcctaccatgaaaagtaccctaccatctaccacctgaggaagaagctggtcgactctaccgacaaggctgacttgcgcttgatttacctggctctcgctcacatgataaagttccgcggacacttcctcattgagggagacctgaacccagacaactccgacgtggacaagctcttcatccagctcgttcagacctacaaccagcttttcgaggagaacccaatcaacgccagtggagttgacgccaaggctatcctctctgctcgtctgtcaaagtccaggaggcttgagaacttgattgcccagctgcctggcgaaaagaagaacggactgttcggaaacttgatcgctctctccctgggattgactcccaacttcaagtccaacttcgacctcgccgaggacgctaagttgcagttgtctaaagacacctacgacgatgacctcgacaacttgctggcccagataggcgaccaatacgccgatctcttcctcgccgctaagaacttgtccgacgcaatcctgctgtccgacatcctgagagtcaacactgagattaccaaagctcctctgtctgcttccatgattaagcgctacgacgagcaccaccaagatctgaccctgctcaaggccctggtgagacagcagctgcccgagaagtacaaggagatctttttcgaccagtccaagaacggctacgccggatacattgacggaggcgcctcccaggaagagttctacaagttcatcaagcccatccttgagaagatggacggtaccgaggagctgttggtgaagttgaacagagaggacctgttgaggaagcagagaaccttcgacaacggaagcatccctcaccaaatccacctgggagagctccacgccatcttgaggaggcaggaggatttctatcccttcctgaaggacaaccgcgagaagattgagaagatcttgaccttcagaattccttactacgtcgggccactcgccagaggaaactctaggttcgcctggatgacccgcaaatctgaagagaccattactccctggaacttcgaggaagtcgtggacaagggcgcttccgctcagtctttcatcgagaggatgaccaacttcgataaaaatctgcccaacgagaaggtgctgcccaagcactccctgttgtacgagtatttcacagtgtacaacgagctcaccaaggtgaagtacgtcacagagggaatgaggaagcctgccttcttgtccggagagcagaagaaggccatcgtcgacctgctcttcaagaccaacaggaaggtgactgtcaagcagctgaaggaggactacttcaagaagatcgagtgcttcgactccgtcgagatctctggtgtcgaggacaggttcaacgcctcccttgggacttaccacgatctgctcaagattattaaagacaaggacttcctggacaacgaggagaacgaggacatccttgaggacatcgtgctcaccctgaccttgttcgaagacagggaaatgatcgaagagaggctcaagacctacgcccacctcttcgacgacaaggtgatgaaacagctgaagagacgcagatataccggctggggaaggctctcccgcaaattgatcaacgggatcagggacaagcagtcagggaagactatactcgacttcctgaagtccgacggattcgccaacaggaacttcatgcagctcattcacgacgactccttgaccttcaaggaggacatccagaaggctcaggtgtctggacagggtgactccttgcatgagcacattgctaacttggccggctctcccgctattaagaagggcattttgcagaccgtgaaggtcgttgacgagctcgtgaaggtgatgggacgccacaagccagagaacatcgttattgagatggctcgcgagaaccaaactacccagaaagggcagaagaattcccgcgagaggatgaagcgcattgaggagggcataaaagagcttggctctcagatcctcaaggagcaccccgtcgagaacactcagctgcagaacgagaagctgtacctgtactacctccaaaacggaagggacatgtacgtggaccaggagctggacatcaacaggttgtccgactacgacgtcgaccacatcgtgcctcagtccttcctgaaggatgactccatcgacaataaagtgctgacacgctccgataaaaatagaggcaagtccgacaacgtcccctccgaggaggtcgtgaagaagatgaaaaactactggagacagctcttgaacgccaagctcatcacccagcgtaagttcgacaacctgactaaggctgagagaggaggattgtccgagctcgataaggccggattcatcaagagacagctcgtcgaaacccgccaaattaccaagcacgtggcccaaattctggattcccgcatgaacaccaagtacgatgaaaatgacaagctgatccgcgaggtcaaggtgatcaccttgaagtccaagctggtctccgacttccgcaaggacttccagttctacaaggtgagggagatcaacaactaccaccacgcacacgacgcctacctcaacgctgtcgttggaaccgccctcatcaaaaaatatcctaagctggagtctgagttcgtctacggcgactacaaggtgtacgacgtgaggaagatgatcgctaagtctgagcaggagatcggcaaggccaccgccaagtacttcttctactccaacatcatgaacttcttcaagaccgagatcactctcgccaacggtgagatcaggaagcgcccactgatcgagaccaacggtgagactggagagatcgtgtgggacaaagggagggatttcgctactgtgaggaaggtgctctccatgcctcaggtgaacatcgtcaagaagaccgaagttcagaccggaggattctccaaggagtccatcctccccaagagaaactccgacaagctgatcgctagaaagaaagactgggaccctaagaagtacggaggcttcgattctcctaccgtggcctactctgtgctggtcgtggccaaggtggagaagggcaagtccaagaagctgaaatccgtcaaggagctcctcgggattaccatcatggagaggagttccttcgagaagaaccctatcgacttcctggaggccaagggatataaagaggtgaagaaggacctcatcatcaagctgcccaagtactccctcttcgagttggagaacggaaggaagaggatgctggcttctgccggagagttgcagaagggaaatgagctcgcccttccctccaagtacgtgaacttcctgtacctcgcctctcactatgaaaagttgaagggctctcctgaggacaacgagcagaagcagctcttcgtggagcagcacaagcactacctggacgaaattatcgagcagatctctgagttctccaagcgcgtgatattggccgacgccaacctcgacaaggtgctgtccgcctacaacaagcacagggataagcccattcgcgagcaggctgaaaacattatccacctgtttaccctcacaaacttgggagcccctgctgccttcaagtacttcgacaccaccattgacaggaagagatacacctccaccaaggaggtgctcgacgcaacactcatccaccaatccatcaccggcctctatgaaacaaggattgacttgtcccagctgggaggcgactctagagccgatcccaagaagaagagaaaggtgtaggttaacctagacttgtccatcttctggattggccaacttaattaatgtatgaaataaaaggatgcacacatagtgacatgctaatcactataatgtgggcatcaaagttgtgtgttatgtgtaattactagttatctgaataaaagagaaagagatcatccatatttcttatcctaaatgaatgtcacgtgtctttataattctttgatgaaccagatgcatttcattaaccaaatccatatacatataaatattaatcatatataattaatatcaattgggttagcaaaacaaatctagtctaggtgtgttttgcgaattcgatatcaagcttatcgataccgtcgagggggggcccggtaccgg

SEQ ID NO: 304 - DNA, 64 bp, Artificial sequence
  DD20 qPCR amplicon
attcggaactgacacacgacatgatggaacgtgactaaggtgggtttttgactttgcatgtcga

SEQ ID NO: 305 - DNA, 115 bp, Artificial sequence
  DD43 qPCR amplicon
aaagaagaggcagactccaattcctcttttctagaataccctccgtacgtacaagtacaagggacttgtgagttgtaaggctgtatttacaatagtgaaaagagaatcatctggg

SEQ ID NO: 306 - DNA, 20 bp, Artificial sequence
  primer, DD20-CR1
ggaactgacacacgacatga

SEQ ID NO: 307 - DNA, 20 bp, Artificial sequence
  primer, DD20-CR2
gacatgatggaacgtgacta

SEQ ID NO: 308 - DNA, 22 bp, Artificial sequence
  primer, DD20-F
attcggaactgacacacgacat

SEQ ID NO: 309 - DNA, 17 bp, Artificial sequence
  FAM-MGB probe, DD20-T
atggaacgtgactaagg

SEQ ID NO: 310 - DNA, 22 bp, Artificial sequence
  primer, DD20-R
tcgacatgcaaagtcaaaaacc

SEQ ID NO: 311 - DNA, 20 bp, Artificial sequence
  primer, DD43CR1
gtcccttgtacttgtacgta

SEQ ID NO: 312 - DNA, 20 bp, Artificial sequence
  primer, DD43CR2
gtattctagaaaagaggaat

SEQ ID NO: 313 - DNA, 26 bp, Artificial sequence
  primer, DD43-F
ttctagaataccctccgtacgtacaa

SEQ ID NO: 314 - DNA, 26 bp, Artificial sequence
  primer, DD43-F2
aaagaagaggcagactccaattcctc

SEQ ID NO: 315 - DNA, 19 bp, Artificial sequence
  FAM-MGB probe, DD43-T
caagggacttgtgagttgt

SEQ ID NO: 316 - DNA, 26 bp, Artificial sequence
  primer, DD43-R
cccagatgattctcttttcactattg

SEQ ID NO: 317 - DNA, 19 bp, Artificial sequence
  primer, Cas9-F
ccttcttccaccgccttga

SEQ ID NO: 318 - DNA, 19 bp, Artificial sequence
  FAM-MGB probe, Cas9-T
aatcattcctggtggagga

SEQ ID NO: 319 - DNA, 21 bp, Artificial sequence
  primer, Cas9-R
tgggtgtctctcgtgcttttt

SEQ ID NO: 320 - DNA, 22 bp, Artificial sequence
  primer, Sams-76F
aggcttgttgtgcagtttttga

SEQ ID NO: 321 - DNA, 22 bp, Artificial sequence
  FAM-MGB probe, FRT1I-63T
tggactagtggaagttcctata

SEQ ID NO: 322 - DNA, 21 bp, Artificial sequence
  primer, FRT1I-41F
gcggtgagttcaggctttttc

SEQ ID NO: 323 - DNA, 31 bp, Artificial sequence
  primer, DD20-LB
ggttataccttcttcttagtgtggtctatcc

SEQ ID NO: 324 - DNA, 31 bp, Artificial sequence
  primer, Sams-A1
cccaaaataattagtatgattggtaaggaag

SEQ ID NO: 325 - DNA, 23 bp, Artificial sequence
  primer, QC498A-S1
ggaacttcactagagcttgcggc

SEQ ID NO: 326 - DNA, 28 bp, Artificial sequence
  primer, DD20-RB
gccattacattcttcataagttcctctc

SEQ ID NO: 327 - DNA, 26 bp, Artificial sequence
  primer, DD43-LB
gtgtagtccattgtagccaagtcacc

SEQ ID NO: 328 - DNA, 24 bp, Artificial sequence
  primer, DD43-RB
caaaccggagagagaggaagaacc

SEQ ID NO: 329 - DNA, 2105 bp, Artificial Sequence
  DD20 HR1-HR2 PCR amplicon
ggttataccttcttcttagtgtggtctatcccctagtaataattacacatctaagatatccccttctttttcaagtaaaataatatcatatgatctcattttagtgaaacaatactatttccctgataactctcttcaacattagggacttcatctaatcatctactttcaaggtataactagacgtatttgttcttttaaaaaaaacactagatgtactcgtcaactcaaaattcatcgttcatgcattttaattaaactttaattagctaatgagtagaaaaagatcatacgagtaaaatagaagaatcttcctagattttggaagaatggattggagtgtaagtgaattgatccattagtggaagatgctctttacaatggccaaactgttctaattgttagagcacatttgagatgaaacacttcagtagtggaggtaacctacaatcctaggatctgtatcctctatcactaatggagcaatgggtttgagattgacttactcctttccttgtctctcgtagtgcatatgcgcactttcaaaggctacacaaaagccgttaactttttgtttatttaagttacgaaagatagttgaattagagtaaatggtgatattgaattaggattttaaataattttaaaagaatttttttaataaaaaaaatattgtgttgttggatcaaaatttttaaataacatgaataaggaaatggattgcaatgaggttttaaacaattattttaacatataggattttagaaagacttttataatattttgttgaagtttagattttaatatatttatgttttaaaattttaaaaaaaacttcatgaatttataatatttgaaaaagacacgtgaatatttagaaaacatttaaaattacaataataaatcataatgagatagggtgtattcatgtgtagacgagacaccaagtatatggttcacaagtgaatcatcttttttttttacagcacaagtagatcacttgtacttatcaaaattcggaactgacacacgacatgatggaacgtgactaaggtgggtttttgactttgcatgtcgaagtgagagtgattttattgagagaataatagaagacctacaaaacaaatgatcccgacgctaaagtaagtacgagagttaagagaataaatgggaaaatatgcatacatgattaggtgtgtgttcgtctcaagaaagtacgaatgaatatggtgtgtttgtagtacatgaatgatgtgttttgagggttcaagggaaattgatatttatagagtgaaatggaaccagaggtctttgttgacaagggttgttatgactcttgcaaataattaatagcttataaataatagccaataacttattatagatagagttagagataatatatagctaaatttgaacaaggcatacaaaacaaaaatgctaaatatgaataagacaatcaaaattgtagtcgatgttcaactctttgtcgttgaagaacttgtttgcagtggtatagtaaatgggtgtgagtgcagtgtctcacccatctcacaccacacaaccaacttcatatctaaagatattgtcgctgaatacaaaattgagttatggaatatacaattcataatatagatacgaaaaatcatttcttacaaaacattcaatcaaaaattattcaaacataattctagattaagtaatccgaagtacaagttagtatcctagatccgttaatttaaaattatgtttgcataattttggatttggtgttctataagggcacaattttgttcattcttacaagtttgtcaattctaaaatatatgcaaatttgaagaaaaaaaatttacgaatgtgtctcaaacaataacttaatgggaggagaatgagggatgaagaagctcaaaattaccaacgccttctacctcaagaagctacttcacacaaaatatgactggcggaaggataggggacaaccgataacgagaaggagatacataaggtaatgtacgttgttgtgtgaggtacacaattatggggatgaagaagttcaactttagtcgaaaaaatgtttgagaggaacttatgaagaatgtaatggc

SEQ ID NO: 330 - DNA, 1204 bp, Artificial Sequence
  DD20 HR1-SAMS PCR amplicon
ggttataccttcttcttagtgtggtctatcccctagtaataattacacatctaagatatccccttctttttcaagtaaaataatatcatatgatctcattttagtgaaacaatactatttccctgataactctcttcaacattagggacttcatctaatcatctactttcaaggtataactagacgtatttgttcttttaaaaaaaacactagatgtactcgtcaactcaaaattcatcgttcatgcattttaattaaactttaattagctaatgagtagaaaaagatcatacgagtaaaatagaagaatcttcctagattttggaagaatggattggagtgtaagtgaattgatccattagtggaagatgctctttacaatggccaaactgttctaattgttagagcacatttgagatgaaacacttcagtagtggaggtaacctacaatcctaggatctgtatcctctatcactaatggagcaatgggtttgagattgacttactcctttccttgtctctcgtagtgcatatgcgcactttcaaaggctacacaaaagccgttaactttttgtttatttaagttacgaaagatagttgaattagagtaaatggtgatattgaattaggattttaaataattttaaaagaatttttttaataaaaaaaatattgtgttgttggatcaaaatttttaaataacatgaataaggaaatggattgcaatgaggttttaaacaattattttaacatataggattttagaaagacttttataatattttgttgaagtttagattttaatatatttatgttttaaaattttaaaaaaaacttcatgaatttataatatttgaaaaagacacgtgaatatttagaaaacatttaaaattacaataataaatcataatgagatagggtgtattcatgtgtagacgagacaccaagtatatggttcacaagtgaatcatcttttttttttacagcacaagtagatcacttgtacttatcaaaattcggaactgacacacactagtggtcacctaagtgactagggtcacgtgaccctagtcacttattcccaaacactagtaacggccgccagtgtgctggaattcgcccttcccaagctttgctctagatcaaactcacatccaaacataacatggatatcttccttaccaatcatactaattattttggg

SEQ ID NO: 331 - DNA, 1459 bp, Artificial Sequence
  DD20 NOS-HR2 PCR amplicon
ggaacttcactagagcttgcggccgcgcatgctgacttaatcagctaacgccactcgacctgcaggcatgcccgcggatatcgatgggccccggccgaagcttcaagtttgtacaaaaaagcaggctggcgccggaaccaattcagtcgactggatccggtaccgaattcgcggccgcactcgagatatctagacccagctttcttgtacaaagtggccgttaacggatcggccagaatccggtaagtgactagggtcacgtgaccctagtcacttaaattcggccagaatggccatctggattcagcaggcctagaaggcccggaccgattaaactttaattcggtccgggttacctctagaaagcttgtcgacctgcagacacgacatgatggaacgtgactaaggtgggtttttgactttgcatgtcgaagtgagagtgattttattgagagaataatagaagacctacaaaacaaatgatcccgacgctaaagtaagtacgagagttaagagaataaatgggaaaatatgcatacatgattaggtgtgtgttcgtctcaagaaagtacgaatgaatatggtgtgtttgtagtacatgaatgatgtgttttgagggttcaagggaaattgatatttatagagtgaaatggaaccagaggtctttgttgacaagggttgttatgactcttgcaaataattaatagcttataaataatagccaataacttattatagatagagttagagataatatatagctaaatttgaacaaggcatacaaaacaaaaatgctaaatatgaataagacaatcaaaattgtagtcgatgttcaactctttgtcgttgaagaacttgtttgcagtggtatagtaaatgggtgtgagtgcagtgtctcacccatctcacaccacacaaccaacttcatatctaaagatattgtcgctgaatacaaaattgagttatggaatatacaattcataatatagatacgaaaaatcatttcttacaaaacattcaatcaaaaattattcaaacataattctagattaagtaatccgaagtacaagttagtatcctagatccgttaatttaaaattatgtttgcataattttggatttggtgttctataagggcacaattttgttcattcttacaagtttgtcaattctaaaatatatgcaaatttgaagaaaaaaaatttacgaatgtgtctcaaacaataacttaatgggaggagaatgagggatgaagaagctcaaaattaccaacgccttctacctcaagaagctacttcacacaaaatatgactggcggaaggataggggacaaccgataacgagaaggagatacataaggtaatgtacgttgttgtgtgaggtacacaattatggggatgaagaagttcaactttagtcgaaaaaatgtttgagaggaacttatgaagaatgtaatggc

SEQ ID NO: 332 - DNA, 2098 bp, Artificial Sequence
  DD43 HR1-HR2 PCR amplicon
gtgtagtccattgtagccaagtcaccaatatcttgttcccctccttggtttggcataaattgattttcatggctcttctcggtcgaaactggagctaattcacccttagtctctcttaaaattctggctgtaagaaacaccacagaacacataaattataaactaattataatttgaagagtaaaatatgtttttactcttatgatttaattagtgtagttttaattttctcctttttttaaaaaattttggtattcataaatttcaattttttaaaaataattgttgttacccgttaatgataacgggatatgttatgttaccactaaatcggacaaaaaaaattcaaaacttttataaggattaaaattaacaaaaatattttaaaaaaatctaacctcaataaagttaaatttataagcacaaaataatacttttaagcctaatttggcaagacacaagcaagctcacctgtagcattaatagaaaggaagcaaagcaagagaaaagcaaccagaaggaagcgtttgcttggtgacacagccatcttacttgaatttatggtattactgagaaaccttgatcttgcttcaaaatcttctagttaccctctttttataggcagaaagagaactagctagttgccaataggatatgaggacatgtggtgcaatgcactcactcttcaaggacaagaaaaacaatggctacaattgtggttcaaatcaatgtctcctgctctgtcctgcctgaaaatgacacccttttgcttggaaaagaggatcaaagctaagaacaggagtggcttcattcccttcatgtaaccaaacactttcgcattctgtcattcgtgaatcagcaaaatctgcaaccaaaaatatatggtgcctaaataaaagaaataaaataatttagagttgcggactaaaataataaacaaaagaaatatattataatctagaattaatttaggactaaaagaagaggcagactccaattcctcttttctagaataccctccgtacgtacaagtacaagggacttgtgagttgtaaggctgtatttacaatagtgaaaagagaatcatctgggtgattgggtttttagtccccagtgacgaattaaaggtttgaattcttagtatgtttgggaatcaattaggaatttcgttttggactttccaaagcaattattcactttttcattcattaaatgtgactaaaaaattgttatttctccattggccaggatgcatcgtttatataaacataaccttagtgaaagcagtgttttcatgtgacagcggcagactatatcttaaacaaaattacttgtaaagaaagataccgttaggaaaaaaatgaaaagaaaattgaagctatcacttgtttactttcctaatatctttcaagaatacaatgtggtgaatttcaattttccctacatatgtataccgtcagcctgacgcaacttatgaaacttctctttctttcatttgatgtatatataaagacacattatatataaagaaactttatatatatctccatcatattttagtacttgctactatgtaaaattagctgttggaagtatctcaagaaacatttaatttattgaaccaagcattaaccattcatctacatttgagttctaaaataaatcttaaatgatgtggaggaagggaaattgttaattatttccctcttctcctacatggatatacctgaaacatgcaatggatggattagattttaacatttgcagcctgagaagttcactgactttcctccagctattttatgtgtgcccgccaccatttatagctcatgattgtagctgaactgcaaaaactgcatcgattgcaaactgaaattgagaatctcttttcaactttatatgctgattgatgcatgctgagcatgctatactagtactcgaagttcctatatgtagactttgttactgcctaatatactttgtgtttgttctcaagttcttattttatttcatattttttcctataaaaggttaatggctctataaaggttgagtgacatatatatactataaaggttcttcctctctctccggtttg

SEQ ID NO: 333 - DNA, 1202 bp, Artificial Sequence
  DD43 HR1-SAMS PCR PCR amplicon
gtgtagtccattgtagccaagtcaccaatatcttgttcccctccttggtttggcataaattgattttcatggctcttctcggtcgaaactggagctaattcacccttagtctctcttaaaattctggctgtaagaaacaccacagaacacataaattataaactaattataatttgaagagtaaaatatgtttttactcttatgatttaattagtgtagttttaattttctcctttttttaaaaaattttggtattcataaatttcaattttttaaaaataattgttgttacccgttaatgataacgggatatgttatgttaccactaaatcggacaaaaaaaattcaaaacttttataaggattaaaattaacaaaaatattttaaaaaaatctaacctcaataaagttaaatttataagcacaaaataatacttttaagcctaatttggcaagacacaagcaagctcacctgtagcattaatagaaaggaagcaaagcaagagaaaagcaaccagaaggaagcgtttgcttggtgacacagccatcttacttgaatttatggtattactgagaaaccttgatcttgcttcaaaatcttctagttaccctctttttataggcagaaagagaactagctagttgccaataggatatgaggacatgtggtgcaatgcactcactcttcaaggacaagaaaaacaatggctacaattgtggttcaaatcaatgtctcctgctctgtcctgcctgaaaatgacacccttttgcttggaaaagaggatcaaagctaagaacaggagtggcttcattcccttcatgtaaccaaacactttcgcattctgtcattcgtgaatcagcaaaatctgcaaccaaaaatatatggtgcctaaataaaagaaataaaataatttagagttgcggactaaaataataaacaaaagaaatatattataatctagaattaatttaggactaaaagaagaggcagactccaattcctcttttctagaataccctccgtacgtacactagtggtcacctaagtgactagggtcacgtgaccctagtcacttattcccaaacactagtaacggccgccagtgtgctggaattcgcccttcccaagctttgctctagatcaaactcacatccaaacataacatggatatcttccttaccaatcatactaattattttggg

SEQ ID NO: 334 - DNA, 1454 bp, Artificial Sequence
  DD43 NOS-HR2 PCR PCR amplicon
ggaacttcactagagcttgcggccgcgcatgctgacttaatcagctaacgccactcgacctgcaggcatgcccgcggatatcgatgggccccggccgaagcttcaagtttgtacaaaaaagcaggctggcgccggaaccaattcagtcgactggatccggtaccgaattcgcggccgcactcgagatatctagacccagctttcttgtacaaagtggccgttaacggatcggccagaatccggtaagtgactagggtcacgtgaccctagtcacttaaattcggccagaatggccatctggattcagcaggcctagaaggcccggaccgattaaactttaattcggtccgggttacctctagaaagcttgtcgacctgcaggtacaagtacaagggacttgtgagttgtaaggctgtatttacaatagtgaaaagagaatcatctgggtgattgggtttttagtccccagtgacgaattaaaggtttgaattcttagtatgtttgggaatcaattaggaatttcgttttggactttccaaagcaattattcactttttcattcattaaatgtgactaaaaaattgttatttctccattggccaggatgcatcgtttatataaacataaccttagtgaaagcagtgttttcatgtgacagcggcagactatatcttaaacaaaattacttgtaaagaaagataccgttaggaaaaaaatgaaaagaaaattgaagctatcacttgtttactttcctaatatctttcaagaatacaatgtggtgaatttcaattttccctacatatgtataccgtcagcctgacgcaacttatgaaacttctctttctttcatttgatgtatatataaagacacattatatataaagaaactttatatatatctccatcatattttagtacttgctactatgtaaaattagctgttggaagtatctcaagaaacatttaatttattgaaccaagcattaaccattcatctacatttgagttctaaaataaatcttaaatgatgtggaggaagggaaattgttaattatttccctcttctcctacatggatatacctgaaacatgcaatggatggattagattttaacatttgcagcctgagaagttcactgactttcctccagctattttatgtgtgcccgccaccatttatagctcatgattgtagctgaactgcaaaaactgcatcgattgcaaactgaaattgagaatctcttttcaactttatatgctgattgatgcatgctgagcatgctatactagtactcgaagttcctatatgtagactttgttactgcctaatatactttgtgtttgttctcaagttcttattttatttcatattttttcctataaaaggttaatggctctataaaggttgagtgacatatatatactataaaggttcttcctctctctccggtttg

SEQ ID NO: 335 - DNA, 60 bp, Glycine max
  soybean genomic DD20CR1 target region (1)..(60)
acttgtacttatcaaaattcggaactgacacacgacatgatggaacgtgactaaggtggg

SEQ ID NO: 336 - DNA, 59 bp, Artificial sequence
  sequence of gRNA/Cas9 system mediated NHEJ
acttgtacttatcaaaattcggaactgacacacgactgatggaacgtgactaaggtggg

SEQ ID NO: 337 - DNA, 59 bp, Artificial sequence
  sequence of gRNA/Cas9 system mediated NHEJ
acttgtacttatcaaaattcggaactgacacacgaatgatggaacgtgactaaggtggg

SEQ ID NO: 338 - DNA, 58 bp, Artificial sequence
  sequence of gRNA/Cas9 system mediated NHEJ
acttgtacttatcaaaattcggaactgacacacgatgatggaacgtgactaaggtggg

SEQ ID NO: 339 - DNA, 58 bp, Artificial sequence
  sequence of gRNA/Cas9 system mediated NHEJ
acttgtacttatcaaaattcggaactgacacacgacgatggaacgtgactaaggtggg

SEQ ID NO: 340 - DNA, 58 bp, Artificial sequence
  sequence of gRNA/Cas9 system mediated NHEJ
acttgtacttatcaaaattcggaactgacacacggtgatggaacgtgactaaggtggg

SEQ ID NO: 341 - DNA, 57 bp, Artificial sequence
  sequence of gRNA/Cas9 system mediated NHEJ
acttgtacttatcaaaattcggaactgacacacatgatggaacgtgactaaggtggg

SEQ ID NO: 342 - DNA, 57 bp, Artificial sequence
  sequence of gRNA/Cas9 system mediated NHEJ
acttgtacttatcaaaattcggaactgacacacgtgatggaacgtgactaaggtggg

SEQ ID NO: 343 - DNA, 56 bp, Artificial sequence
  sequence of gRNA/Cas9 system mediated NHEJ
acttgtacttatcaaaattcggaactgacacactgatggaacgtgactaaggtggg

SEQ ID NO: 344 - DNA, 56 bp, Artificial sequence
  sequence of gRNA/Cas9 system mediated NHEJ
acttgtacttatcaaaattcggaactgacacacggatggaacgtgactaaggtggg

SEQ ID NO: 345 - DNA, 55 bp, Artificial sequence
  sequence of gRNA/Cas9 system mediated NHEJ
acttgtacttatcaaaattcggaactgacacacgatggaacgtgactaaggtggg

SEQ ID NO: 346 - DNA, 55 bp, Artificial sequence
  sequence of gRNA/Cas9 system mediated NHEJ
acttgtacttatcaaaattcggaactgacacatgatggaacgtgactaaggtggg

SEQ ID NO: 347 - DNA, 54 bp, Artificial sequence
  sequence of gRNA/Cas9 system mediated NHEJ
acttgtacttatcaaaattcggaactgacacacatggaacgtgactaaggtggg

SEQ ID NO: 348 - DNA, 54 bp, Artificial sequence
  sequence of gRNA/Cas9 system mediated NHEJ
acttgtacttatcaaaattcggaactgacactgatggaacgtgactaaggtggg

SEQ ID NO: 349 - DNA, 53 bp, Artificial sequence
  sequence of gRNA/Cas9 system mediated NHEJ
acttgtacttatcaaaattcggaactgacacgatggaacgtgactaaggtggg

SEQ ID NO: 350 - DNA, 51 bp, Artificial sequence
  sequence of gRNA/Cas9 system mediated NHEJ
acttgtacttatcaaaattcggaactgatgatggaacgtgactaaggtggg

SEQ ID NO: 351 - DNA, 50 bp, Artificial sequence
  sequence of gRNA/Cas9 system mediated NHEJ
acttgtacttatcaaaattcggaactgacatggaacgtgactaaggtggg

SEQ ID NO: 352 - DNA, 50 bp, Artificial sequence
  sequence of gRNA/Cas9 system mediated NHEJ
acttgtacttatcaaaattcggaactgtgatggaacgtgactaaggtggg

SEQ ID NO: 353 - DNA, 51 bp, Artificial sequence
  sequence of gRNA/Cas9 system mediated NHEJ
acttgtacttatcaaaattcggaactgacacacgaacgtgactaaggtggg

SEQ ID NO: 354 - DNA, 50 bp, Artificial sequence
  sequence of gRNA/Cas9 system mediated NHEJ
acttgtacttatcaaaattcggaactgacacggaacgtgactaaggtggg

SEQ ID NO: 355 - DNA, 49 bp, Artificial sequence
  sequence of gRNA/Cas9 system mediated NHEJ
acttgtacctatcaaaattcggaactgaatggaacgtgactaaggtggg

SEQ ID NO: 356 - DNA, 48 bp, Artificial sequence
  sequence of gRNA/Cas9 system mediated NHEJ
acttgtacttatcaaaattcggaactgatggaacgtgactaaggtggg

SEQ ID NO: 357 - DNA, 46 bp, Artificial sequence
  sequence of gRNA/Cas9 system mediated NHEJ
acttgtacttatcaaaattcggaactgagaacgtgactaaggtggg

SEQ ID NO: 358 - DNA, 38 bp, Artificial sequence
  sequence of gRNA/Cas9 system mediated target site modification
acttgtacttatcaaaattcggaactgacacacgacat

SEQ ID NO: 359 - DNA, 38 bp, Artificial sequence
  sequence of gRNA/Cas9 system mediated NHEJ
acttgtacttatcaaaattcggaactgacaaaggtggg

SEQ ID NO: 360 - DNA, 39 bp, Artificial sequence
  sequence of gRNA/Cas9 system mediated NHEJ
acttgtacttatcaaaattcggaacgtgactaaggtggg

SEQ ID NO: 361 - DNA, 24 bp, Artificial sequence
  sequence of gRNA/Cas9 system mediated NHEJ
actatggaacgtgactaaggtggg

SEQ ID NO: 362 - DNA, 211 bp, Artificial sequence
  sequence of gRNA/Cas9 system mediated target site modification
acttgtacttatcaaaattcggaactgacacacggccggtgatggattggtggatgagtgttgcgtcgagcacctccttggtggaggtgtatctcttcctgtcaatggtggtgtcgaagtacttgaaggcagcaggggctcccaagtttgtgagggtaaacaggtggataatgttttcagcctgctcgcgatggaacgtgactaaggtggg

SEQ ID NO: 363 - DNA, 90 bp, Artificial sequence
  sequence of gRNA/Cas9 system mediated target site modification
acttgtacttatcaaaaactacttgtgctgtaaaaaaaaagaggaacaatcttcactcatcaataagtgatggaacgcgactaaggtggg

SEQ ID NO: 364 - DNA, 57 bp, Glycine max
  soybean genomic DD20CR2 target region (1)..(57)
gacacacgacatgatggaacgtgactaaggtgggtttttgactttgcatgtcgaagt

SEQ ID NO: 365 - DNA, 61 bp, artificial sequence
  sequence of gRNA/Cas9 system mediated target site modification
actgacacacgacatgatggaacgtgaactaaggtgggtttttgactttgcatgtcgaagt

SEQ ID NO: 366 - DNA, 59 bp, Artificial sequence
  sequence of gRNA/Cas9 system mediated NHEJ
actgacacacgacatgatggaacgtactaaggtgggtttttgactttgcatgtcgaagt

SEQ ID NO: 367 - DNA, 58 bp, Artificial sequence
  sequence of gRNA/Cas9 system mediated NHEJ
actgacacacgacatgatggaacgtctaaggtgggtttttgactttgcatgtcgaagt

SEQ ID NO: 368 - DNA, 58 bp, Artificial sequence
  sequence of gRNA/Cas9 system mediated NHEJ
actgacacacgacatgatggaacgtgaaaggtgggtttttgactttgcatgtcgaagt

SEQ ID NO: 369 - DNA, 57 bp, Artificial sequence
  sequence of gRNA/Cas9 system mediated NHEJ
actgacacacgacatgatggaacgctaaggtgggtttttgactttgcatgtcgaagt

SEQ ID NO: 370 - DNA, 57 bp, Artificial sequence
  sequence of gRNA/Cas9 system mediated NHEJ
actgacacacgacatgatggaacgtgaaggtgggtttttgactttgcatgtcgaagt

SEQ ID NO: 371 - DNA, 56 bp, Artificial sequence
  sequence of gRNA/Cas9 system mediated NHEJ
actgacacacgacatgatggaacgtgaggtgggtttttgactttgcatgtcgaagt

SEQ ID NO: 372 - DNA, 56 bp, Artificial sequence
  sequence of gRNA/Cas9 system mediated NHEJ
actgacacacgacatgatggaacgtaaggtgggtttttgactttgcatgtcgaagt

SEQ ID NO: 373 - DNA, 56 bp, Artificial sequence
  sequence of gRNA/Cas9 system mediated NHEJ
actgacacacgacatgatggaacctaaggtgggtttttgactttgcatgtcgaagt

SEQ ID NO: 374 - DNA, 56 bp, Artificial sequence; identical to SEQ ID NO: 371
  sequence of gRNA/Cas9 system mediated NHEJ

SEQ ID NO: 375 - DNA, 55 bp, Artificial sequence
  sequence of gRNA/Cas9 system mediated NHEJ
actgacacacgacatgatggaactaaggtgggtttttgactttgcatgtcgaagt

SEQ ID NO: 376 - DNA, 54 bp, Artificial sequence
  sequence of gRNA/Cas9 system mediated NHEJ
actgacacacgacatgatggaataaggtgggtttttgactttgcatgtcgaagt

SEQ ID NO: 377 - DNA, 53 bp, Artificial sequence
  sequence of gRNA/Cas9 system mediated NHEJ
actgacacacgacatgatggctaaggtgggtttttgactttgcatgtcgaagt

SEQ ID NO: 378 - DNA, 53 bp, Artificial sequence
  sequence of gRNA/Cas9 system mediated NHEJ
actgacacacgacatgatggataaggtgggtttttgactttgcatgtcgaagt

SEQ ID NO: 379 - DNA, 51 bp, Artificial sequence
  sequence of gRNA/Cas9 system mediated NHEJ
actgacacacgacatgatggaaggtgggtttttgactttgcatgtcgaagt

SEQ ID NO: 380 - DNA, 50 bp, Artificial sequence
  sequence of gRNA/Cas9 system mediated NHEJ
actgacacacgacatgatggaggtgggtttttgactttgcatgtcgaagt

SEQ ID NO: 381 - DNA, 44 bp, Artificial sequence
  sequence of gRNA/Cas9 system mediated NHEJ
actgacacacgacatgatgggtttttgactttgcatgtcgaagt

SEQ ID NO: 382 - DNA, 43 bp, Artificial sequence
  sequence of gRNA/Cas9 system mediated NHEJ
actgacacacgacaggtgggtttttgactttgcatgtcgaagt

SEQ ID NO: 383 - DNA, 40 bp, Artificial sequence
  sequence of gRNA/Cas9 system mediated NHEJ
actgacactaaggtgggtttttgactttgcatgtcgaagt

SEQ ID NO: 384 - DNA, 25 bp, Artificial sequence
  sequence of gRNA/Cas9 system mediated NHEJ
actgacacacgacatgatggaacgt

SEQ ID NO: 385 - DNA, 20 bp, Artificial sequence
  sequence of gRNA/Cas9 system mediated NHEJ
actgacacacgacatgatgg

SEQ ID NO: 386 - DNA, 60 bp, Glycine max
  soybean genomic DD43CR1 target region (1)..(60)
agccttacaactcacaagtcccttgtacttgtacgtacggagggtattctagaaaagagg

SEQ ID NO: 387 - DNA, 59 bp, Artificial sequence
  sequence of gRNA/Cas9 system mediated NHEJ
agccttacaactcacaagtcccttgtacttgtactacggagggtattctagaaaagagg

SEQ ID NO: 388 - DNA, 59 bp, Artificial sequence
  sequence of gRNA/Cas9 system mediated NHEJ
agccttacaactcacaagtcccttgtacttgtagtacggagggtattctagaaaagagg

SEQ ID NO: 389 - DNA, 58 bp, Artificial sequence
  sequence of gRNA/Cas9 system mediated NHEJ
agccttacaactcacaagtcccttgtacttgtgtacggagggtattctagaaaagagg

SEQ ID NO: 390 - DNA, 58 bp, Artificial sequence
  sequence of gRNA/Cas9 system mediated NHEJ
agccttacaactcacaagtcccttgtacttgcgtacggagggtattctagaaaagagg

SEQ ID NO: 391 - DNA, 57 bp, Artificial sequence
  sequence of gRNA/Cas9 system mediated NHEJ
agccttacaactcacaagtcccttgtacttggtacggagggtattctagaaaagagg

SEQ ID NO: 392 - DNA, 57 bp, Artificial sequence
  sequence of gRNA/Cas9 system mediated NHEJ
agccttacaactcacaagtcccttgtacttgttacggagggtattctagaaaagagg

SEQ ID NO: 393 - DNA, 56 bp, Artificial sequence
  sequence of gRNA/Cas9 system mediated NHEJ
agccttacaactcacaagtcccttgtacttgtacggagggtattctagaaaagagg

SEQ ID NO: 394 - DNA, 55 bp, Artificial sequence
  sequence of gRNA/Cas9 system mediated NHEJ
agccttacaactcacaagtcccttgtactttacggagggtattctagaaaagagg

SEQ ID NO: 395 - DNA, 55 bp, Artificial sequence
  sequence of gRNA/Cas9 system mediated NHEJ
agccttacaactcacaagtcccttgtactgtacggagggtattctagaaaagagg

SEQ ID NO: 396 - DNA, 54 bp, Artificial sequence
  sequence of gRNA/Cas9 system mediated NHEJ
agccttacaactcacaagccccttgtacttacggagggtattctagaaaagagg

SEQ ID NO: 397 - DNA, 52 bp, Artificial sequence
  sequence of gRNA/Cas9 system mediated NHEJ
agccttacaactcacaagtcccttgtatacggagggtattctagaaaagagg

SEQ ID NO: 398 - DNA, 52 bp, Artificial sequence
  sequence of gRNA/Cas9 system mediated NHEJ
agccttacaactcacaagtcccttgtgtacggagggtattctagaaaagagg

SEQ ID NO: 399 - DNA, 50 bp, Artificial sequence
  sequence of gRNA/Cas9 system mediated NHEJ
agccttacaactcacaagtcccttgtacggagggtattctagaaaagagg

SEQ ID NO: 400 - DNA, 49 bp, Artificial sequence
  sequence of gRNA/Cas9 system mediated NHEJ
agccttacaactcacaagtccctttacggagggtattctagaaaagagg

SEQ ID NO: 401 - DNA, 48 bp, Artificial sequence
  sequence of gRNA/Cas9 system mediated NHEJ
agccttacaactcacaagtcccttacggagggtattctagaaaagagg

SEQ ID NO: 402 - DNA, 47 bp, Artificial sequence
  sequence of gRNA/Cas9 system mediated NHEJ
agccttacaactcacaagtccctacggagggtattctagaaaagagg

SEQ ID NO: 403 - DNA, 43 bp, Artificial sequence
  sequence of gRNA/Cas9 system mediated NHEJ
agccttacaactcacaagtcccttgtacttgtaagaaaagagg

SEQ ID NO: 404 - DNA, 49 bp, Artificial sequence
  sequence of gRNA/Cas9 system mediated target site modification
agccttacaactcacaagtcctaaattaaaggttattctagaaaagagg

SEQ ID NO: 405 - DNA, 227 bp, Artificial sequence
  sequence of gRNA/Cas9 system mediated target site modification
agccttacaactcacaagtcccttgtacttgtagaatccagttcataaaacaagtgacacacaacagatatgaactggactacgtcgaacccacaaatcccacaaagcgcgtgaaatcaaatcgctcaaaccacaaaaaagaacaacgcgtttgttacacgctaataccaaaattatacccaaatcttaagctatttatgcgtacggagggtattctagaaaagagg

SEQ ID NO: 406 - DNA, 97 bp, Artificial sequence
  sequence of gRNA/Cas9 system mediated target site modification
agccttacaactcacaagtcccttgtacttgtaatgctcccctctaaactcgtatcgcttcagagttgagagtacggagggtattctagaaaagagg

SEQ ID NO: 407 - DNA, 183 bp, Artificial sequence
  sequence of gRNA/Cas9 system mediated target site modification
agccttacaactcacaagtcccttgtatatagatacccacaaaataagtaaacccgatccaaaatcttaaatgatgtggaggaagggaaattgttaattattcccctcttctcctacatggatatacctgaaacatgcaatggatggattagattttgtacggagggtattctagaaaagagg

SEQ ID NO: 408 - DNA, 234 bp, Artificial sequence
  sequence of gRNA/Cas9 system mediated target site modification
agccttacaactcacaagtcccttgtacttgtaccaggggatgttttttatttacattcacgtcttttggaaagagccgctaaattaagttctcagttaggcgaaggaagtatgactgctttaccaatagttgaaactcaatcgggagatgtttcagcttatattcctactaatgtaatttccattacagatggccaaatattcttacgtacggagggtattctagaaaagagg

SEQ ID NO: 409 - DNA, 280 bp, Artificial sequence
  sequence of gRNA/Cas9 system mediated target site modification
agccttacaactcacaagtcccttgtacttgtaccgaaaatttcagccataaaaaaagttataatagaatttaaagcaaaagtttcattttttaaacatatatactgacacgctccgataaaaatagaggcaagtccgacaacgtcccctccgaggaggtcgtgaagaagatgaaaaactactggagacagctcttgaacgccaagctcatcacccagcgtaagctcgacaacctgactaaggctgagagaggtgtacggagggtattctagaaaagagg

SEQ ID NO: 410 - DNA, 250 bp, Artificial sequence
  sequence of gRNA/Cas9 system mediated target site modification
agccttacaactcacaagtcccttgtacttgtactggatttggtgagggatgcttccgttgtcgaaggttctctgcttcctcaacaggtcctctctgttcaacttcaccaacagctcctcggtaccgtccatcttctcaaggatgaagatcgagtgcttcgactccgtcgagatctctggtgtcgaggacaggttcaacgcctcccttgggacttgccacgatcgtacggagggtattctagaaaagagg

SEQ ID NO: 411 - DNA, 161 bp, Artificial sequence
  sequence of gRNA/Cas9 system mediated target site modification
agccttacaactcacaagtcccttatgacctcaaaaaaaagattcacctccaacacaccaaataactcgaaaatctctttcctattctctagaaagtataggaacttccactagtccatgaaaaagcctgaactcgtacggagggtattctagaaaagagg

SEQ ID NO: 412 - DNA, 185 bp, Artificial sequence
  sequence of gRNA/Cas9 system mediated target site modification
agccttacaactcacaagtcccttgtacttgtacacctggggcatggagagcaccttcctcacagtagcgaaatccctccctttgtcccacacgatctctccagtctcaccgttggtctcgatcagtgggcgcttcctgatctcaccgttggcgagagtgtacggagggtattctagaaaagagg

SEQ ID NO: 413 - DNA, 212 bp, Artificial sequence
  sequence of gRNA/Cas9 system mediated target site modification
agccttacaactcacaagtcccttgtacttgtgctaggttagccgaaagatggttatcggttcaaggacgcaaggtgcccctgctttttcagggtaataaggggtagagaaaatgcctcgagccaaagttcgagtaccaggcgctacagcgctgaagtaatccatgccatactcccaggaaaagccgtacggagggtattctagaaaagagg

SEQ ID NO: 414 - DNA, 231 bp, Artificial sequence
  sequence of gRNA/Cas9 system mediated target site modification
agccttacaactcacaagtcccttgtacttgtactcaagttcttattttatttcatattttttcctataaaaggttaatggctctataaaggttgagtgacggatccggtcacctaagtgactagggtcacgtgaccctagtcacttattcccgggcaactttattatacaaagttgatagatctcgaattcattccgattaatcgtggcgagggtattctagaaaagagg

SEQ ID NO: 415 - DNA, 98 bp, Artificial sequence
  LIGCas-1 mutation 1
tcctctgtaacgatttacgcacctgctgggaattgtaccgtacgtgccccggtcggaggatatatatacctcacacgtacgcgtacgcgtatatatac

SEQ ID NO: 416 - DNA, 98 bp, Artificial sequence
  LIGCas-1 mutation 2
tcctctgtaacgatttacgcacctgctgggaattgtaccgtacgtgccccggacggaggatatatatacctcacacgtacgcgtacgcgtatatatac

SEQ ID NO: 417 - DNA, 98 bp, Artificial sequence
  LIGCas-1 mutation 3
tcctctgtaacgatttacgcacctgctgggaattgtaccgtacgtgccccgggcggaggatatatatacctcacacgtacgcgtacgcgtatatatac

SEQ ID NO: 418 - DNA, 98 bp, Artificial sequence
  LIGCas-1 mutation 4
tcctctgtaacgatttacgcacctgctgggaattgtaccgtacgtgccccggccggaggatatatatacctcacacgtacgcgtacgcgtatatatac

SEQ ID NO: 419 - DNA, 99 bp, Artificial sequence
  LIGCas-1 mutation 5
tcctctgtaacgatttacgcacctgctgggaattgtaccgtacgtgccccggatcggaggatatatatacctcacacgtacgcgtacgcgtatatatac

SEQ ID NO: 420 - DNA, 94 bp, Artificial sequence
  LIGCas-1 mutation 6
tcctctgtaacgatttacgcacctgctgggaattgtaccgtacgtgccccggaggatatatatacctcacacgtacgcgtacgcgtatatatac

SEQ ID NO: 421 - DNA, 81 bp, Artificial sequence
  LIGCas-1 mutation 7
tcctctgtaacgatttacgcacctgctgggaattgtaccgtacgtgccccggttcacacgtacgcgtacgcgtatatatac

SEQ ID NO: 422 - DNA, 65 bp, Artificial sequence
  LIGCas-1 mutation 8
tcctctgtaacgatttacgcacctgctgggaattgtaccgtacgtacgcgtacgcgtatatatac

SEQ ID NO: 423 - DNA, 99 bp, Artificial sequence
  LIGCas-1 mutation 9
tcctctgtaacgatttacgcacctgctgggaattgtaccgtacgtgccccggttcggaggatatatatacctcacacgtacgcgtacgcgtatatatac

SEQ ID NO: 424 - DNA, 95 bp, Artificial sequence
  LIGCas-1 mutation 10
tcctctgtaacgatttacgcacctgctgggaattgtaccgtacgtgcccccggaggatatatatacctcacacgtacgcgtacgcgtatatatac

SEQ ID NO: 425 - DNA, 98 bp, Artificial sequence
  LIGCas-2 mutation 1
gaagctgtaacgatttacgcacctgctgggaattgtaccgtacgtgaccccggcggaggatatatatacctcacacgtacgcgtacgcgtatatatac

SEQ ID NO: 426 - DNA, 98 bp, Artificial sequence
  LIGCas-2 mutation 2
gaagctgtaacgatttacgcacctgctgggaattgtaccgtacgtgtccccggcggaggatatatatacctcacacgtacgcgtacgcgtatatatac

SEQ ID NO: 427 - DNA, 96 bp, Artificial sequence
  LIGCas-2 mutation 3
gaagctgtaacgatttacgcacctgctgggaattgtaccgtacgtccccggcggaggatatatatacctcacacgtacgcgtacgcgtatatatac

SEQ ID NO: 428 - DNA, 98 bp, Artificial sequence
  LIGCas-2 mutation 4
gaagctgtaacgatttacgcacctgctgggaattgtaccgtacgtggccccggcggaggatatatatacctcacacgtacgcgtacgcgtatatatac

SEQ ID NO: 429 - DNA, 99 bp, Artificial sequence
  LIGCas-2 mutation 5
gaagctgtaacgatttacgcacctgctgggaattgtaccgtacgtgcaccccggcggaggatatatatacctcacacgtacgcgtacgcgtatatatac

SEQ ID NO: 430 - DNA, 87 bp, Artificial sequence
  LIGCas-2 mutation 6
gaagctgtaacgatttacgcacctgctgggaattgtacccggcggaggatatatatacctcacacgtacgcgtacgcgtatatatac

SEQ ID NO: 431 - DNA, 92 bp, Artificial sequence
  LIGCas-2 mutation 7
gaagctgtaacgatttacgcacctgctgggaattgtaccgtccccggcggaggatatatatacctcacacgtacgcgtacgcgtatatatac

SEQ ID NO: 432 - DNA, 94 bp, Artificial sequence
  LIGCas-2 mutation 8
gaagctgtaacgatttacgcacctgctgggaattgtaccgtacccccggcggaggatatatatacctcacacgtacgcgtacgcgtatatatac

SEQ ID NO: 433 - DNA, 95 bp, Artificial sequence
  LIGCas-2 mutation 9
gaagctgtaacgatttacgcacctgctgggaattgtaccgtacgccccggcggaggatatatatacctcacacgtacgcgtacgcgtatatatac

SEQ ID NO: 434 - DNA, 88 bp, Artificial sequence
  LIGCas-2 mutation 10
gaagctgtaacgatttacgcacctgctgggaattgtaccccggcggaggatatatatacctcacacgtacgcgtacgcgtatatatac

SEQ ID NO: 435 - DNA, 98 bp, Artificial sequence; identical to SEQ ID NO: 77
  LIGCas-3 mutation 1

SEQ ID NO: 436 - DNA, 96 bp, Artificial sequence; identical to SEQ ID NO: 78
  LIGCas-3 mutation 2

SEQ ID NO: 437 - DNA, 95 bp, Artificial sequence; identical to SEQ ID NO: 80
  LIGCas-3 mutation 3

SEQ ID NO: 438 - DNA, 96 bp, Artificial sequence; identical to SEQ ID NO: 79
  LIGCas-3 mutation 4

SEQ ID NO: 439 - DNA, 68 bp, Artificial sequence; identical to SEQ ID NO: 81
  LIGCas-3 mutation 5

SEQ ID NO: 440 - DNA, 93 bp, Artificial sequence; identical to SEQ ID NO: 83
  LIGCas-3 mutation 6

SEQ ID NO: 441 - DNA, 89 bp, Artificial sequence
  LIGCas-3 mutation 7
aaggcgcaaatgagtagcagcgcacgtatatatacgcgtacgtgaggtatatatatcctccgccggggcacgtacggtacaattcccag

SEQ ID NO: 442 - DNA, 89 bp, Artificial sequence
  LIGCas-3 mutation 8
aaggcgcaaatgagtagcagcgcacgtatatatacgcgtacgcgtactatatatatcctccgccggggcacgtacggtacaattcccag

SEQ ID NO: 443 - DNA, 94 bp, Artificial sequence
  LIGCas-3 mutation 9
aaggcgcaaatgagtagcagcgcacgtatatatacgcgtacgcgtacggaggtatatatatcctccgccggggcacgtacggtacaattcccag

SEQ ID NO: 444 - DNA, 96 bp, Artificial sequence
  LIGCas-3 mutation 0
aaggcgcaaatgagtagcagcgcacgtatatatacgcgtacgcgtacgatgaggtatatatatcctccgccggggcacgtacggtacaattcccag

SEQ ID NO: 445 - DNA, 1051 bp, Artificial sequence
  LIGCas-1_crRNA_Expression_Cassette
tgagagtacaatgatgaacctagattaatcaatgccaaagtctgaaaaatgcaccctcagtctatgatccagaaaatcaagattgcttgaggccctgttcggttgttccggattagagccccggattaattcctagccggattacttctctaatttatatagattttgatgagctggaatgaatcctggcttattccggtacaaccgaacaggccctgaaggataccagtaatcgctgagctaaattggcatgctgtcagagtgtcagtattgcagcaaggtagtgagataaccggcatcatggtgccagtttgatggcaccattagggttagagatggtggccatgggcgcatgtcctggccaactttgtatgatatatggcagggtgaataggaaagtaaaattgtattgtaaaaagggatttcttctgtttgttagcgcatgtacaaggaatgcaagttttgagcgagggggcatcaaagatctggctgtgtttccagctgtttttgttagccccatcgaatccttgacataatgatcccgcttaaataagcaacctcgcttgtatagttccttgtgctctaacacacgatgatgataagtcgtaaaatagtggtgtccaaagaatttccaggcccagttgtaaaagctaaaatgctattcgaatttctactagcagtaagtcgtgtttagaaattatttttttatataccttttttccttctatgtacagtaggacacagtgtcagcgccgcgttgacggagaatatttgcaaaaaagtaaaagagaaagtcatagcggcgtatgtgccaaaaacttcgtcacagagagggccataagaaacatggcccacggcccaatacgaagcaccgcgacgaagcccaaacagcagtccgtaggtggagcaaagcgctgggtaatacgcaaacgttttgtcccaccttgactaatcacaagagtggagcgtaccttataaaccgagccgcaagcaccgaattgtaccgtacgtgccccggcgggttttagagctatgctgttttgtttttttt

SEQ ID NO: 446 - DNA, 1051 bp, Artificial sequence
  LIGCas-2_crRNA_Expression_Cassette
tgagagtacaatgatgaacctagattaatcaatgccaaagtctgaaaaatgcaccctcagtctatgatccagaaaatcaagattgcttgaggccctgttcggttgttccggattagagccccggattaattcctagccggattacttctctaatttatatagattttgatgagctggaatgaatcctggcttattccggtacaaccgaacaggccctgaaggataccagtaatcgctgagctaaattggcatgctgtcagagtgtcagtattgcagcaaggtagtgagataaccggcatcatggtgccagtttgatggcaccattagggttagagatggtggccatgggcgcatgtcctggccaactttgtatgatatatggcagggtgaataggaaagtaaaattgtattgtaaaaagggatttcttctgtttgttagcgcatgtacaaggaatgcaagttttgagcgagggggcatcaaagatctggctgtgtttccagctgtttttgttagccccatcgaatccttgacataatgatcccgcttaaataagcaacctcgcttgtatagttccttgtgctctaacacacgatgatgataagtcgtaaaatagtggtgtccaaagaatttccaggcccagttgtaaaagctaaaatgctattcgaatttctactagcagtaagtcgtgtttagaaattatttttttatataccttttttccttctatgtacagtaggacacagtgtcagcgccgcgttgacggagaatatttgcaaaaaagtaaaagagaaagtcatagcggcgtatgtgccaaaaacttcgtcacagagagggccataagaaacatggcccacggcccaatacgaagcaccgcgacgaagcccaaacagcagtccgtaggtggagcaaagcgctgggtaatacgcaaacgttttgtcccaccttgactaatcacaagagtggagcgtaccttataaaccgagccgcaagcaccgaattggaattgtaccgtacgtgcccgttttagagctatgctgttttgtttttttt

SEQ ID NO: 447 - DNA, 1047 bp, Artificial sequence
  LIGCas-3_crRNA_Expression_Cassette
tgagagtacaatgatgaacctagattaatcaatgccaaagtctgaaaaatgcaccctcagtctatgatccagaaaatcaagattgcttgaggccctgttcggttgttccggattagagccccggattaattcctagccggattacttctctaatttatatagattttgatgagctggaatgaatcctggcttattccggtacaaccgaacaggccctgaaggataccagtaatcgctgagctaaattggcatgctgtcagagtgtcagtattgcagcaaggtagtgagataaccggcatcatggtgccagtttgatggcaccattagggttagagatggtggccatgggcgcatgtcctggccaactttgtatgatatatggcagggtgaataggaaagtaaaattgtattgtaaaaagggatttcttctgtttgttagcgcatgtacaaggaatgcaagttttgagcgagggggcatcaaagatctggctgtgtttccagctgtttttgttagccccatcgaatccttgacataatgatcccgcttaaataagcaacctcgcttgtatagttccttgtgctctaacacacgatgatgataagtcgtaaaatagtggtgtccaaagaatttccaggcccagttgtaaaagctaaaatgctattcgaatttctactagcagtaagtcgtgtttagaaattatttttttatataccttttttccttctatgtacagtaggacacagtgtcagcgccgcgttgacggagaatatttgcaaaaaagtaaaagagaaagtcatagcggcgtatgtgccaaaaacttcgtcacagagagggccataagaaacatggcccacggcccaatacgaagcaccgcgacgaagcccaaacagcagtccgtaggtggagcaaagcgctgggtaatacgcaaacgttttgtcccaccttgactaatcacaagagtggagcgtaccttataaaccgagccgcaagcaccgaattgcgtacgcgtacgtgtggttttagagctatgctgttttgtttttttt

SEQ ID NO: 448 - DNA, 1087 bp, Artificial sequence
  tracrRNA_Expression_Cassette
tgagagtacaatgatgaacctagattaatcaatgccaaagtctgaaaaatgcaccctcagtctatgatccagaaaatcaagattgcttgaggccctgttcggttgttccggattagagccccggattaattcctagccggattacttctctaatttatatagattttgatgagctggaatgaatcctggcttattccggtacaaccgaacaggccctgaaggataccagtaatcgctgagctaaattggcatgctgtcagagtgtcagtattgcagcaaggtagtgagataaccggcatcatggtgccagtttgatggcaccattagggttagagatggtggccatgggcgcatgtcctggccaactttgtatgatatatggcagggtgaataggaaagtaaaattgtattgtaaaaagggatttcttctgtttgttagcgcatgtacaaggaatgcaagttttgagcgagggggcatcaaagatctggctgtgtttccagctgtttttgttagccccatcgaatccttgacataatgatcccgcttaaataagcaacctcgcttgtatagttccttgtgctctaacacacgatgatgataagtcgtaaaatagtggtgtccaaagaatttccaggcccagttgtaaaagctaaaatgctattcgaatttctactagcagtaagtcgtgtttagaaattatttttttatataccttttttccttctatgtacagtaggacacagtgtcagcgccgcgttgacggagaatatttgcaaaaaagtaaaagagaaagtcatagcggcgtatgtgccaaaaacttcgtcacagagagggccataagaaacatggcccacggcccaatacgaagcaccgcgacgaagcccaaacagcagtccgtaggtggagcaaagcgctgggtaatacgcaaacgttttgtcccaccttgactaatcacaagagtggagcgtaccttataaaccgagccgcaagcaccgaattggaaccattcaaaacagcatagcaagttaaaataaggctagtccgttatcaacttgaaaaagtggcaccgagtcggtgctttttttt

SEQ ID NO: 449 - DNA, 63 bp, Artificial Sequence
  LIGCas-2 forward primer for primary
ctacactctttccctacacgacgctcttccgatctgaagctgtaacgatttacgcacctgctg

SEQ ID NO: 450 - DNA, 60 bp, Artificial Sequence
  LIGCas-3 forward primer for primary PCR
ctacactctttccctacacgacgctcttccgatctttcccgcaaatgagtagcagcgcac

SEQ ID NO: 451 - DNA, 19 bp, Artificial sequence
  Zm-ARGOS8-CTS1, Cas9 target sequence 1
gcgtgcatcgatccatcgc

SEQ ID NO: 452 - DNA, 21 bp, Artificial sequence
  m-ARGOS8-CTS2, Cas9 target sequence 2
ggctacggatagatatgatgc

SEQ ID NO: 453 - DNA, 20 bp, Artificial sequence
  Zm-ARGOS8-CTS3, Cas9 target sequence 3
gttacttctctaagcacggc

SEQ ID NO: 454 - DNA, 21 bp, Artificial sequence
  P1, Forward_primer
gcgccattccctaaaggtaac

SEQ ID NO: 455 - DNA, 23 bp, Artificial sequence
  P2, Reverse_primer
gctaatcgtaagtgacgcttgga

SEQ ID NO: 456 - DNA, 31 bp, Artificial sequence; identical to SEQ ID NO: 99
  P3, Forward_primer

SEQ ID NO: 457 - DNA, 20 bp, Artificial sequence
  P4, Reverse_primer
ctgcgaactgcttgattccg

SEQ ID NO: 458 - DNA, 24 bp, Artificial sequence
  P5, Forward_primer
accgtccttatctctgcatcatct

SEQ ID NO: 459 - DNA, 31 bp, Artificial sequence; identical to SEQ ID NO: 99
  PBS, Primer Binding Site

SEQ ID NO: 460 - DNA, 1823 bp, Zea mays
  misc_feature (1)..(1823): Zm-GOS2 PRO-GOS2 INTRON, maize GOS2 promoter and GOS2 intron1 including the promoter, 5'-UTR1, INTRON1 and 5'-UTR2 sequence
taattattggctgtaggattctaaacagagcctaaatagctggaatagctctagccctcaatccaaactaatgatatctatacttatgcaactctaaatttttattctaaaagtaatatttcatttttgtcaacgagattctctactctattccacaatcttttgaagctatatttaccttaaatctgtactctataccaataatcatatattctattatttatttttatctctctcctaaggagcatccctctatgtctgcatggcccccgcctcgggtcccaatctcttgctctgctagtagcacagaagaaaacactagaaatgacttgcttgacttagagtatcagataaacatcatgtttacttaactttaatttgtatcggtttctactatttttataatatttttgtctctatagatactacgtgcaacagtataatcaacctagtttaatccagagcgaaggattttttactaagtacgtgactccatatgcacagcgttccttttatggttcctcactgggcacagcataaacgaaccctgtccaatgttttcagcgcgaacaaacagaaattccatcagcgaacaaacaacatacatgcgagatgaaaataaataataaaaaaagctccgtctcgataggccggcacgaatcgagagcctccatagccagttttttccatcggaacggcggttcgcgcacctaattatatgcaccacacgcctataaagccaaccaacccgtcggaggggcgcaagccagacagaagacagcccgtcagcccctctcgtttttcatccgccttcgcctccaaccgcgtgcgctccacgcctcctccaggaaagcgagaggtgagcgcagtcccctttcccctccttccaattcaattcgtcttctcgttcgcagccctaggatttgggggtctggaggggtttgatcgtttctcgccgtgaatctgctttggtgtaaaccaacggatctcggatcgtagtcttcagaagatcccggattttgcggtttggcccctcctggattcaattcgtcgtatcgttcgcagccctaggatttggggatctggaggggtttgatcgtttctcgccgcgaatctgctctggtgtaaaccaacggatctcgggtcgtagtcttcagaaggtcccggattttgcggtttggcccctcctggattcaattcgtcgtatcgttcgcagccctaggatttggggatctggaggggtttgatcctttctcgccgcgaatctgctctggtataaccaacggatctcgggtcgtagtcttcagaaggtcccggattttgcggtttggtggttcttgctctatgaatcagagggatggttcttcccggatttatgccttgcggccactctgtcgaatcatggggtttcgacccgattcgtaggcgtgctccctgttttggatgggaagtaggcgtgtttgtagtattcgtgcttcgattcgtcaacggagattagaagacctgggatgggatttgaggaaatctaggtatctgtctagcacgtttctagatctattcttcagctgttatatgagagtaattttggaaccctggtggggtatgtttgaccgagtattctgtagattattgtccgtgacttgctggctgttaccgtccttatctctgcatcatctatctgtgctagtttctgcgtgcttctcaaatatttccggcctgtgtagcatgtgactgataatatgattttggcagcttctgcataagaacaacaaatcaaaagcttgatcagctcggtgcctacaaaacctcaacaaccaagtttc

SEQ ID NO: 461 - DNA, 556 bp, Zea mays
  misc_feature (1)..(556): Zm-ARGOS8 promoter
gttacttctctaagcacggctggatttcaggcctctagtcctctactagtactagctacacgacgtgcacgcatgcatcacagcatcaacaactagacacgcacacgctgcacgcggccggggaacccactgattccccccttccccgcgcgcggtttgatttcctttcctggtacggatccatatctgagggcttgttcggttattcccaacacacatgtattggatgggattgaaaaaaaaatgagaagaagtttgacttgtttgggattcaaacccatccaatcccactcaatccacatggattgagagctaaccgaacaagccctcatagtacatacctggtacggatccatatcatagtacatagatccagtagaatagaaggtgatccgaccgccggcgcttgcgttgttttccccggtccattgaacctgccaaccctcctaaccacaggcacgccaaaccgcgggctccggccaccaccgccaccgccacctgccctgccgcacctctccaaccccaaatccaggggggggggggggcaccatgcgtg

SEQ ID NO: 462 - DNA, 155 bp, Zea mays
  misc_feature (1)..(155): Zm-ARGOS8 5'-UTR
catcgatccatcgctggcgcgcgggtccggcggggcggtctgtgagggcaaatttatataggtctagtgggtacccggctacggatagatatgatgctgcactgcacattggctatatctgaggctcctgcgcgcgccttggccaggtgtctgtc

SEQ ID NO: 463 - DNA, 285 bp, Zea mays
atgcgggcgatgccgcaggaagaggaagccgcggtggcgacgacgaccatggccgggggcaaggtggcggcgctgctggccacggcggccgcgctgctgctgctgctcccgctggcgctgccgccgctgccgccgccgcccacgcagctgttgttcgtccccgtggtcttgctgctcctcgtggcgtccctcgcgttctgccccgccgcgaccccctcgccgtcgccgatgcatgccgccgaccacgggtcgttcgggaccactggatcaccgcacctatgttga

SEQ ID NO: 464 - DNA, 2843 bp, Zea mays
  misc_feature (1)..(2843): Zm-GOS2 gene, including promoter, 5'-UTR, CDS, 3'-UTR and introns sequence
taattattggctgtaggattctaaacagagcctaaatagctggaatagctctagccctcaatccaaactaatgatatctatacttatgcaactctaaatttttattctaaaagtaatatttcatttttgtcaacgagattctctactctattccacaatcttttgaagctatatttaccttaaatctgtactctataccaataatcatatattctattatttatttttatctctctcctaaggagcatccctctatgtctgcatggcccccgcctcgggtcccaatctcttgctctgctagtagcacagaagaaaacactagaaatgacttgcttgacttagagtatcagataaacatcatgtttacttaactttaatttgtatcggtttctactatttttataatatttttgtctctatagatactacgtgcaacagtataatcaacctagtttaatccagagcgaaggattttttactaagtacgtgactccatatgcacagcgttccttttatggttcctcactgggcacagcataaacgaaccctgtccaatgttttcagcgcgaacaaacagaaattccatcagcgaacaaacaacatacatgcgagatgaaaataaataataaaaaaagctccgtctcgataggccggcacgaatcgagagcctccatagccagttttttccatcggaacggcggttcgcgcacctaattatatgcaccacacgcctataaagccaaccaacccgtcggaggggcgcaagccagacagaagacagcccgtcagcccctctcgtttttcatccgccttcgcctccaaccgcgtgcgctccacgcctcctccaggaaagcgagaggtgagcgcagtcccctttcccctccttccaattcaattcgtcttctcgttcgcagccctaggatttgggggtctggaggggtttgatcgtttctcgccgtgaatctgctttggtgtaaaccaacggatctcggatcgtagtcttcagaagatcccggattttgcggtttggcccctcctggattcaattcgtcgtatcgttcgcagccctaggatttggggatctggaggggtttgatcgtttctcgccgcgaatctgctctggtgtaaaccaacggatctcgggtcgtagtcttcagaaggtcccggattttgcggtttggcccctcctggattcaattcgtcgtatcgttcgcagccctaggatttggggatctggaggggtttgatcctttctcgccgcgaatctgctctggtataaccaacggatctcgggtcgtagtcttcagaaggtcccggattttgcggtttggtggttcttgctctatgaatcagagggatggttcttcccggatttatgccttgcggccactctgtcgaatcatggggtttcgacccgattcgtaggcgtgctccctgttttggatgggaagtaggcgtgtttgtagtattcgtgcttcgattcgtcaacggagattagaagacctgggatgggatttgaggaaatctaggtatctgtctagcacgtttctagatctattcttcagctgttatatgagagtaattttggaaccctggtggggtatgtttgaccgagtattctgtagattattgtccgtgacttgctggctgttaccgtccttatctctgcatcatctatctgtgctagtttctgcgtgcttctcaaatatttccggcctgtgtagcatgtgactgataatatgattttggcagcttctgcataagaacaacaaatcaaaagcttgatcagctcggtgcctacaaaacctcaacaaccaagtttcatgtctgatctcgacgtccagcttccatctgcctttggtatggctacttctcaattcatgatgccatgtttttttttatattgtggttttacataatacatagcatcttccagcttcctgaagagtattactgaatagattgataacatcatacacacgaagttcatcttgaacatgcttattagtgttctgtttgcatctgatggtatggcatcatctttgatagatccgtttgctgaggcaaatgctgaggactctggtgctggtcctggaacgaaggattatgtgcatgtgcgcatccagcagcgcaacggcagaaagagtctgactacagtccagggtctgaagaaagagttcagctataacaagatcctcaaggatctgaagaaggaattctgctgcaatggtactgtagttcaggacccagagctaggccaggtaagatacgagaacaatgcatttcaagcttgtaaaaatggtatctgccggttggtggatatactgatctgtttgtccgctgcaggtcattcagctccaaggtgaccagcgcaagaatgttgctactttcctagttcaggtattcagaatcttcagacctggccagctgaatactgttttaccataccgatagatgttcaatctgttaatactgatcgtgcaattattacttgtcttggtaggctgggattgcgaagaaagagaacatcaagattcacgggttctaagggacctgtaaatgcttgtgccctatattgtgtgcctccacatattggggagcttgaagcatcgacagttactagtcattgcttacttatataagaacataagtagtatttgctattgtcaagtgtgccttgcttgatgcaagttgtgttttcgtatcattattattatgcacggccatcgtacgtgtatggcttgtatgggttattgccaacttaataaaagcacactctgtttgcctataagcactgatgtttgcctcgtcatgcacatgttgagtcgggttttatttgtatt

SEQ ID NO: 465 - DNA, 800 bp, Zea mays
  misc_feature (1)..(800): Zm-GOS2 PRO, maize GOS2 promoter
taattattggctgtaggattctaaacagagcctaaatagctggaatagctctagccctcaatccaaactaatgatatctatacttatgcaactctaaatttttattctaaaagtaatatttcatttttgtcaacgagattctctactctattccacaatcttttgaagctatatttaccttaaatctgtactctataccaataatcatatattctattatttatttttatctctctcctaaggagcatccctctatgtctgcatggcccccgcctcgggtcccaatctcttgctctgctagtagcacagaagaaaacactagaaatgacttgcttgacttagagtatcagataaacatcatgtttacttaactttaatttgtatcggtttctactatttttataatatttttgtctctatagatactacgtgcaacagtataatcaacctagtttaatccagagcgaaggattttttactaagtacgtgactccatatgcacagcgttccttttatggttcctcactgggcacagcataaacgaaccctgtccaatgttttcagcgcgaacaaacagaaattccatcagcgaacaaacaacatacatgcgagatgaaaataaataataaaaaaagctccgtctcgataggccggcacgaatcgagagcctccatagccagttttttccatcggaacggcggttcgcgcacctaattatatgcaccacacgcctataaagccaaccaacccgtcggaggggcgcaagccagacagaagacagcccgtcagcccctctcgtt

SEQ ID NO: 466 - DNA, 1023 bp, Zea mays
  misc_feature (1)..(1023): GOS2 INTRON, maize GOS2 5'-UTR1 and intron1 and 5'-UTR2 sequence
tttcatccgccttcgcctccaaccgcgtgcgctccacgcctcctccaggaaagcgagaggtgagcgcagtcccctttcccctccttccaattcaattcgtcttctcgttcgcagccctaggatttgggggtctggaggggtttgatcgtttctcgccgtgaatctgctttggtgtaaaccaacggatctcggatcgtagtcttcagaagatcccggattttgcggtttggcccctcctggattcaattcgtcgtatcgttcgcagccctaggatttggggatctggaggggtttgatcgtttctcgccgcgaatctgctctggtgtaaaccaacggatctcgggtcgtagtcttcagaaggtcccggattttgcggtttggcccctcctggattcaattcgtcgtatcgttcgcagccctaggatttggggatctggaggggtttgatcctttctcgccgcgaatctgctctggtataaccaacggatctcgggtcgtagtcttcagaaggtcccggattttgcggtttggtggttcttgctctatgaatcagagggatggttcttcccggatttatgccttgcggccactctgtcgaatcatggggtttcgacccgattcgtaggcgtgctccctgttttggatgggaagtaggcgtgtttgtagtattcgtgcttcgattcgtcaacggagattagaagacctgggatgggatttgaggaaatctaggtatctgtctagcacgtttctagatctattcttcagctgttatatgagagtaattttggaaccctggtggggtatgtttgaccgagtattctgtagattattgtccgtgacttgctggctgttaccgtccttatctctgcatcatctatctgtgctagtttctgcgtgcttctcaaatatttccggcctgtgtagcatgtgactgataatatgattttggcagcttctgcataagaacaacaaatcaaaagcttgatcagctcggtgcctacaaaacctcaacaaccaagtttc

SEQ ID NO: 467 - DNA, 23 bp, Glycine max
gcgtcctttgacagcagctgtgg

SEQ ID NO: 468 - DNA, 23 bp, Glycine max
gcaaccacagctgctgtcaaagg

SEQ ID NO: 469 - DNA, 434 bp, Glycine max; identical to SEQ ID NO: 120

SEQ ID NO: 470 - DNA, 9093 bp, Artificial sequence
  QC878
ccgggtgtgatttagtataaagtgaagtaatggtcaaaagaaaaagtgtaaaacgaagtacctagtaataagtaatattgaacaaaataaatggtaaagtgtcagatatataaaataggctttaataaaaggaagaaaaaaaacaaacaaaaaataggttgcaatggggcagagcagagtcatcatgaagctagaaaggctaccgatagataaactatagttaattaaatacattaaaaaatacttggatctttctcttaccctgtttatattgagacctgaaacttgagagagatacactaatcttgccttgttgtttcattccctaacttacaggactcagcgcatgtcatgtggtctcgttccccatttaagtcccacaccgtctaaacttattaaattattaatgtttataactagatgcacaacaacaaagcttgcgtcctttgacagcagctggttttagagctagaaatagcaagttaaaataaggctagtccgttatcaacttgaaaaagtggcaccgagtcggtgcttttttttgcggccgcaattggatcgggtttacttattttgtgggtatctatacttttattagatttttaatcaggctcctgatttctttttatttcgattgaattcctgaacttgtattattcagtagatcgaataaattataaaaagataaaatcataaaataatattttatcctatcaatcatattaaagcaatgaatatgtaaaattaatcttatctttattttaaaaaatcatataggtttagtatttttttaaaaataaagataggattagttttactattcactgcttattacttttaaaaaaatcataaaggtttagtatttttttaaaataaatataggaatagttttactattcactgctttaatagaaaaatagtttaaaatttaagatagttttaatcccagcatttgccacgtttgaacgtgagccgaaacgatgtcgttacattatcttaacctagctgaaacgatgtcgtcataatatcgccaaatgccaactggactacgtcgaacccacaaatcccacaaagcgcgtgaaatcaaatcgctcaaaccacaaaaaagaacaacgcgtttgttacacgctcaatcccacgcgagtagagcacagtaaccttcaaataagcgaatggggcataatcagaaatccgaaataaacctaggggcattatcggaaatgaaaagtagctcactcaatataaaaatctaggaaccctagttttcgttatcactctgtgctccctcgctctatttctcagtctctgtgtttgcggctgaggattccgaacgagtgaccttcttcgtttctcgcaaaggtaacagcctctgctcttgtctcttcgattcgatctatgcctgtctcttatttacgatgatgtttcttcggttatgtttttttatttatgctttatgctgttgatgttcggttgtttgtttcgctttgtttttgtggttcagttttttaggattcttttggtttttgaatcgattaatcggaagagattttcgagttatttggtgtgttggaggtgaatcttttttttgaggtcatagatctgttgtatttgtgttataaacatgcgactttgtatgattttttacgaggttatgatgttctggttgttttattatgaatctgttgagacagaaccatgatttttgttgatgttcgtttacactattaaaggtttgttttaacaggattaaaagttttttaagcatgttgaaggagtcttgtagatatgtaaccgtcgatagtttttttgtgggtttgttcacatgttatcaagcttaatcttttactatgtatgcgaccatatctggatccagcaaaggcgattttttaattccttgtgaaacttttgtaatatgaagttgaaattttgttattggtaaactataaatgtgtgaagttggagtatacctttaccttcttatttggctttgtgatagtttaatttatatgtattttgagttctgacttgtatttctttgaattgattctagtttaagtaatccatggacaaaaagtactcaatagggctcgacatagggactaactccgttggatgggccgtcatcaccgacgagtacaaggtgccctccaagaagttcaaggtgttgggaaacaccgacaggcacagcataaagaagaatttgatcggtgccctcctcttcgactccggagagaccgctgaggctaccaggctcaagaggaccgctagaaggcgctacaccagaaggaagaacagaatctgctacctgcaggagatcttctccaacgagatggccaaggtggacgactccttcttccaccgccttgaggaatcattcctggtggaggaggataaaaagcacgagagacacccaatcttcgggaacatcgtcgacgaggtggcctaccatgaaaagtaccctaccatctaccacctgaggaagaagctggtcgactctaccgacaaggctgacttgcgcttgatttacctggctctcgctcacatgataaagttccgcggacacttcctcattgagggagacctgaacccagacaactccgacgtggacaagctcttcatccagctcgttcagacctacaaccagcttttcgaggagaacccaatcaacgccagtggagttgacgccaaggctatcctctctgctcgtctgtcaaagtccaggaggcttgagaacttgattgcccagctgcctggcgaaaagaagaacggactgttcggaaacttgatcgctctctccctgggattgactcccaacttcaagtccaacttcgacctcgccgaggacgctaagttgcagttgtctaaagacacctacgacgatgacctcgacaacttgctggcccagataggcgaccaatacgccgatctcttcctcgccgctaagaacttgtccgacgcaatcctgctgtccgacatcctgagagtcaacactgagattaccaaagctcctctgtctgcttccatgattaagcgctacgacgagcaccaccaagatctgaccctgctcaaggccctggtgagacagcagctgcccgagaagtacaaggagatctttttcgaccagtccaagaacggctacgccggatacattgacggaggcgcctcccaggaagagttctacaagttcatcaagcccatccttgagaagatggacggtaccgaggagctgttggtgaagttgaacagagaggacctgttgaggaagcagagaaccttcgacaacggaagcatccctcaccaaatccacctgggagagctccacgccatcttgaggaggcaggaggatttctatcccttcctgaaggacaaccgcgagaagattgagaagatcttgaccttcagaattccttactacgtcgggccactcgccagaggaaactctaggttcgcctggatgacccgcaaatctgaagagaccattactccctggaacttcgaggaagtcgtggacaagggcgcttccgctcagtctttcatcgagaggatgaccaacttcgataaaaatctgcccaacgagaaggtgctgcccaagcactccctgttgtacgagtatttcacagtgtacaacgagctcaccaaggtgaagtacgtcacagagggaatgaggaagcctgccttcttgtccggagagcagaagaaggccatcgtcgacctgctcttcaagaccaacaggaaggtgactgtcaagcagctgaaggaggactacttcaagaagatcgagtgcttcgactccgtcgagatctctggtgtcgaggacaggttcaacgcctcccttgggacttaccacgatctgctcaagattattaaagacaaggacttcctggacaacgaggagaacgaggacatccttgaggacatcgtgctcaccctgaccttgttcgaagacagggaaatgatcgaagagaggctcaagacctacgcccacctcttcgacgacaaggtgatgaaacagctgaagagacgcagatataccggctggggaaggctctcccgcaaattgatcaacgggatcagggacaagcagtcagggaagactatactcgacttcctgaagtccgacggattcgccaacaggaacttcatgcagctcattcacgacgactccttgaccttcaaggaggacatccagaaggctcaggtgtctggacagggtgactccttgcatgagcacattgctaacttggccggctctcccgctattaagaagggcattttgcagaccgtgaaggtcgttgacgagctcgtgaaggtgatgggacgccacaagccagagaacatcgttattgagatggctcgcgagaaccaaactacccagaaagggcagaagaattcccgcgagaggatgaagcgcattgaggagggcataaaagagcttggctctcagatcctcaaggagcaccccgtcgagaacactcagctgcagaacgagaagctgtacctgtactacctccaaaacggaagggacatgtacgtggaccaggagctggacatcaacaggttgtccgactacgacgtcgaccacatcgtgcctcagtccttcctgaaggatgactccatcgacaataaagtgctgacacgctccgataaaaatagaggcaagtccgacaacgtcccctccgaggaggtcgtgaagaagatgaaaaactactggagacagctcttgaacgccaagctcatcacccagcgtaagttcgacaacctgactaaggctgagagaggaggattgtccgagctcgataaggccggattcatcaagagacagctcgtcgaaacccgccaaattaccaagcacgtggcccaaattctggattcccgcatgaacaccaagtacgatgaaaatgacaagctgatccgcgaggtcaaggtgatcaccttgaagtccaagctggtctccgacttccgcaaggacttccagttctacaaggtgagggagatcaacaactaccaccacgcacacgacgcctacctcaacgctgtcgttggaaccgccctcatcaaaaaatatcctaagctggagtctgagttcgtctacggcgactacaaggtgtacgacgtgaggaagatgatcgctaagtctgagcaggagatcggcaaggccaccgccaagtacttcttctactccaacatcatgaacttcttcaagaccgagatcactctcgccaacggtgagatcaggaagcgcccactgatcgagaccaacggtgagactggagagatcgtgtgggacaaagggagggatttcgctactgtgaggaaggtgctctccatgcctcaggtgaacatcgtcaagaagaccgaagttcagaccggaggattctccaaggagtccatcctccccaagagaaactccgacaagctgatcgctagaaagaaagactgggaccctaagaagtacggaggcttcgattctcctaccgtggcctactctgtgctggtcgtggccaaggtggagaagggcaagtccaagaagctgaaatccgtcaaggagctcctcgggattaccatcatggagaggagttccttcgagaagaaccctatcgacttcctggaggccaagggatataaagaggtgaagaaggacctcatcatcaagctgcccaagtactccctcttcgagttggagaacggaaggaagaggatgctggcttctgccggagagttgcagaagggaaatgagctcgcccttccctccaagtacgtgaacttcctgtacctcgcctctcactatgaaaagttgaagggctctcctgaggacaacgagcagaagcagctcttcgtggagcagcacaagcactacctggacgaaattatcgagcagatctctgagttctccaagcgcgtgatattggccgacgccaacctcgacaaggtgctgtccgcctacaacaagcacagggataagcccattcgcgagcaggctgaaaacattatccacctgtttaccctcacaaacttgggagcccctgctgccttcaagtacttcgacaccaccattgacaggaagagatacacctccaccaaggaggtgctcgacgcaacactcatccaccaatccatcaccggcctctatgaaacaaggattgacttgtcccagctgggaggcgactctagagccgatcccaagaagaagagaaaggtgtaggttaacctagacttgtccatcttctggattggccaacttaattaatgtatgaaataaaaggatgcacacatagtgacatgctaatcactataatgtgggcatcaaagttgtgtgttatgtgtaattactagttatctgaataaaagagaaagagatcatccatatttcttatcctaaatgaatgtcacgtgtctttataattctttgatgaaccagatgcatttcattaaccaaatccatatacatataaatattaatcatatataattaatatcaattgggttagcaaaacaaatctagtctaggtgtgttttgcgaattcgatatcaagcttatcgataccgtcgagggggggcccggtaccggcgcgccgttctatagtgtcacctaaatcgtatgtgtatgatacataaggttatgtattaattgtagccgcgttctaacgacaatatgtccatatggtgcactctcagtacaatctgctctgatgccgcatagttaagccagccccgacacccgccaacacccgctgacgcgccctgacgggcttgtctgctcccggcatccgcttacagacaagctgtgaccgtctccgggagctgcatgtgtcagaggttttcaccgtcatcaccgaaacgcgcgagacgaaagggcctcgtgatacgcctatttttataggttaatgtcatgaccaaaatcccttaacgtgagttttcgttccactgagcgtcagaccccgtagaaaagatcaaaggatcttcttgagatcctttttttctgcgcgtaatctgctgcttgcaaacaaaaaaaccaccgctaccagcggtggtttgtttgccggatcaagagctaccaactctttttccgaaggtaactggcttcagcagagcgcagataccaaatactgtccttctagtgtagccgtagttaggccaccacttcaagaactctgtagcaccgcctacatacctcgctctgctaatcctgttaccagtggctgctgccagtggcgataagtcgtgtcttaccgggttggactcaagacgatagttaccggataaggcgcagcggtcgggctgaacggggggttcgtgcacacagcccagcttggagcgaacgacctacaccgaactgagatacctacagcgtgagcattgagaaagcgccacgcttcccgaagggagaaaggcggacaggtatccggtaagcggcagggtcggaacaggagagcgcacgagggagcttccagggggaaacgcctggtatctttatagtcctgtcgggtttcgccacctctgacttgagcgtcgatttttgtgatgctcgtcaggggggcggagcctatggaaaaacgccagcaacgcggcctttttacggttcctggccttttgctggccttttgctcacatgttctttcctgcgttatcccctgattctgtggataaccgtattaccgcctttgagtgagctgataccgctcgccgcagccgaacgaccgagcgcagcgagtcagtgagcgaggaagcggaagagcgcccaatacgcaaaccgcctctccccgcgcgttggccgattcattaatgcaggttgatcagatctcgatcccgcgaaattaatacgactcactatagggagaccacaacggtttccctctagaaataattttgtttaactttaagaaggagatatacccatggaaaagcctgaactcaccgcgacgtctgtcgagaagtttctgatcgaaaagttcgacagcgtctccgacctgatgcagctctcggagggcgaagaatctcgtgctttcagcttcgatgtaggagggcgtggatatgtcctgcgggtaaatagctgcgccgatggtttctacaaagatcgttatgtttatcggcactttgcatcggccgcgctcccgattccggaagtgcttgacattggggaattcagcgagagcctgacctattgcatctcccgccgtgcacagggtgtcacgttgcaagacctgcctgaaaccgaactgcccgctgttctgcagccggtcgcggaggctatggatgcgatcgctgcggccgatcttagccagacgagcgggttcggcccattcggaccgcaaggaatcggtcaatacactacatggcgtgatttcatatgcgcgattgctgatccccatgtgtatcactggcaaactgtgatggacgacaccgtcagtgcgtccgtcgcgcaggctctcgatgagctgatgctttgggccgaggactgccccgaagtccggcacctcgtgcacgcggatttcggctccaacaatgtcctgacggacaatggccgcataacagcggtcattgactggagcgaggcgatgttcggggattcccaatacgaggtcgccaacatcttcttctggaggccgtggttggcttgtatggagcagcagacgcgctacttcgagcggaggcatccggagcttgcaggatcgccgcggctccgggcgtatatgctccgcattggtcttgaccaactctatcagagcttggttgacggcaatttcgatgatgcagcttgggcgcagggtcgatgcgacgcaatcgtccgatccggagccgggactgtcgggcgtacacaaatcgcccgcagaagcgcggccgtctggaccgatggctgtgtagaagtactcgccgatagtggaaaccgacgccccagcactcgtccgagggcaaaggaatagtgaggtacagcttggatcgatccggctgctaacaaagcccgaaaggaagctgagttggctgctgccaccgctgagcaataactagcataaccccttggggcctctaaacgggtcttgaggggttttttgctgaaaggaggaactatatccggatgatcgggcgcgccggtac

SEQ ID NO: 471 - DNA, 9093 bp, Artificial sequence
  QC879
ccgggtgtgatttagtataaagtgaagtaatggtcaaaagaaaaagtgtaaaacgaagtacctagtaataagtaatattgaacaaaataaatggtaaagtgtcagatatataaaataggctttaataaaaggaagaaaaaaaacaaacaaaaaataggttgcaatggggcagagcagagtcatcatgaagctagaaaggctaccgatagataaactatagttaattaaatacattaaaaaatacttggatctttctcttaccctgtttatattgagacctgaaacttgagagagatacactaatcttgccttgttgtttcattccctaacttacaggactcagcgcatgtcatgtggtctcgttccccatttaagtcccacaccgtctaaacttattaaattattaatgtttataactagatgcacaacaacaaagcttgcaaccacagctgctgtcaagttttagagctagaaatagcaagttaaaataaggctagtccgttatcaacttgaaaaagtggcaccgagtcggtgcttttttttgcggccgcaattggatcgggtttacttattttgtgggtatctatacttttattagatttttaatcaggctcctgatttctttttatttcgattgaattcctgaacttgtattattcagtagatcgaataaattataaaaagataaaatcataaaataatattttatcctatcaatcatattaaagcaatgaatatgtaaaattaatcttatctttattttaaaaaatcatataggtttagtatttttttaaaaataaagataggattagttttactattcactgcttattacttttaaaaaaatcataaaggtttagtatttttttaaaataaatataggaatagttttactattcactgctttaatagaaaaatagtttaaaatttaagatagttttaatcccagcatttgccacgtttgaacgtgagccgaaacgatgtcgttacattatcttaacctagctgaaacgatgtcgtcataatatcgccaaatgccaactggactacgtcgaacccacaaatcccacaaagcgcgtgaaatcaaatcgctcaaaccacaaaaaagaacaacgcgtttgttacacgctcaatcccacgcgagtagagcacagtaaccttcaaataagcgaatggggcataatcagaaatccgaaataaacctaggggcattatcggaaatgaaaagtagctcactcaatataaaaatctaggaaccctagttttcgttatcactctgtgctccctcgctctatttctcagtctctgtgtttgcggctgaggattccgaacgagtgaccttcttcgtttctcgcaaaggtaacagcctctgctcttgtctcttcgattcgatctatgcctgtctcttatttacgatgatgtttcttcggttatgtttttttatttatgctttatgctgttgatgttcggttgtttgtttcgctttgtttttgtggttcagttttttaggattcttttggtttttgaatcgattaatcggaagagattttcgagttatttggtgtgttggaggtgaatcttttttttgaggtcatagatctgttgtatttgtgttataaacatgcgactttgtatgattttttacgaggttatgatgttctggttgttttattatgaatctgttgagacagaaccatgatttttgttgatgttcgtttacactattaaaggtttgttttaacaggattaaaagttttttaagcatgttgaaggagtcttgtagatatgtaaccgtcgatagtttttttgtgggtttgttcacatgttatcaagcttaatcttttactatgtatgcgaccatatctggatccagcaaaggcgattttttaattccttgtgaaacttttgtaatatgaagttgaaattttgttattggtaaactataaatgtgtgaagttggagtatacctttaccttcttatttggctttgtgatagtttaatttatatgtattttgagttctgacttgtatttctttgaattgattctagtttaagtaatccatggacaaaaagtactcaatagggctcgacatagggactaactccgttggatgggccgtcatcaccgacgagtacaaggtgccctccaagaagttcaaggtgttgggaaacaccgacaggcacagcataaagaagaatttgatcggtgccctcctcttcgactccggagagaccgctgaggctaccaggctcaagaggaccgctagaaggcgctacaccagaaggaagaacagaatctgctacctgcaggagatcttctccaacgagatggccaaggtggacgactccttcttccaccgccttgaggaatcattcctggtggaggaggataaaaagcacgagagacacccaatcttcgggaacatcgtcgacgaggtggcctaccatgaaaagtaccctaccatctaccacctgaggaagaagctggtcgactctaccgacaaggctgacttgcgcttgatttacctggctctcgctcacatgataaagttccgcggacacttcctcattgagggagacctgaacccagacaactccgacgtggacaagctcttcatccagctcgttcagacctacaaccagcttttcgaggagaacccaatcaacgccagtggagttgacgccaaggctatcctctctgctcgtctgtcaaagtccaggaggcttgagaacttgattgcccagctgcctggcgaaaagaagaacggactgttcggaaacttgatcgctctctccctgggattgactcccaacttcaagtccaacttcgacctcgccgaggacgctaagttgcagttgtctaaagacacctacgacgatgacctcgacaacttgctggcccagataggcgaccaatacgccgatctcttcctcgccgctaagaacttgtccgacgcaatcctgctgtccgacatcctgagagtcaacactgagattaccaaagctcctctgtctgcttccatgattaagcgctacgacgagcaccaccaagatctgaccctgctcaaggccctggtgagacagcagctgcccgagaagtacaaggagatctttttcgaccagtccaagaacggctacgccggatacattgacggaggcgcctcccaggaagagttctacaagttcatcaagcccatccttgagaagatggacggtaccgaggagctgttggtgaagttgaacagagaggacctgttgaggaagcagagaaccttcgacaacggaagcatccctcaccaaatccacctgggagagctccacgccatcttgaggaggcaggaggatttctatcccttcctgaaggacaaccgcgagaagattgagaagatcttgaccttcagaattccttactacgtcgggccactcgccagaggaaactctaggttcgcctggatgacccgcaaatctgaagagaccattactccctggaacttcgaggaagtcgtggacaagggcgcttccgctcagtctttcatcgagaggatgaccaacttcgataaaaatctgcccaacgagaaggtgctgcccaagcactccctgttgtacgagtatttcacagtgtacaacgagctcaccaaggtgaagtacgtcacagagggaatgaggaagcctgccttcttgtccggagagcagaagaaggccatcgtcgacctgctcttcaagaccaacaggaaggtgactgtcaagcagctgaaggaggactacttcaagaagatcgagtgcttcgactccgtcgagatctctggtgtcgaggacaggttcaacgcctcccttgggacttaccacgatctgctcaagattattaaagacaaggacttcctggacaacgaggagaacgaggacatccttgaggacatcgtgctcaccctgaccttgttcgaagacagggaaatgatcgaagagaggctcaagacctacgcccacctcttcgacgacaaggtgatgaaacagctgaagagacgcagatataccggctggggaaggctctcccgcaaattgatcaacgggatcagggacaagcagtcagggaagactatactcgacttcctgaagtccgacggattcgccaacaggaacttcatgcagctcattcacgacgactccttgaccttcaaggaggacatccagaaggctcaggtgtctggacagggtgactccttgcatgagcacattgctaacttggccggctctcccgctattaagaagggcattttgcagaccgtgaaggtcgttgacgagctcgtgaaggtgatgggacgccacaagccagagaacatcgttattgagatggctcgcgagaaccaaactacccagaaagggcagaagaattcccgcgagaggatgaagcgcattgaggagggcataaaagagcttggctctcagatcctcaaggagcaccccgtcgagaacactcagctgcagaacgagaagctgtacctgtactacctccaaaacggaagggacatgtacgtggaccaggagctggacatcaacaggttgtccgactacgacgtcgaccacatcgtgcctcagtccttcctgaaggatgactccatcgacaataaagtgctgacacgctccgataaaaatagaggcaagtccgacaacgtcccctccgaggaggtcgtgaagaagatgaaaaactactggagacagctcttgaacgccaagctcatcacccagcgtaagttcgacaacctgactaaggctgagagaggaggattgtccgagctcgataaggccggattcatcaagagacagctcgtcgaaacccgccaaattaccaagcacgtggcccaaattctggattcccgcatgaacaccaagtacgatgaaaatgacaagctgatccgcgaggtcaaggtgatcaccttgaagtccaagctggtctccgacttccgcaaggacttccagttctacaaggtgagggagatcaacaactaccaccacgcacacgacgcctacctcaacgctgtcgttggaaccgccctcatcaaaaaatatcctaagctggagtctgagttcgtctacggcgactacaaggtgtacgacgtgaggaagatgatcgctaagtctgagcaggagatcggcaaggccaccgccaagtacttcttctactccaacatcatgaacttcttcaagaccgagatcactctcgccaacggtgagatcaggaagcgcccactgatcgagaccaacggtgagactggagagatcgtgtgggacaaagggagggatttcgctactgtgaggaaggtgctctccatgcctcaggtgaacatcgtcaagaagaccgaagttcagaccggaggattctccaaggagtccatcctccccaagagaaactccgacaagctgatcgctagaaagaaagactgggaccctaagaagtacggaggcttcgattctcctaccgtggcctactctgtgctggtcgtggccaaggtggagaagggcaagtccaagaagctgaaatccgtcaaggagctcctcgggattaccatcatggagaggagttccttcgagaagaaccctatcgacttcctggaggccaagggatataaagaggtgaagaaggacctcatcatcaagctgcccaagtactccctcttcgagttggagaacggaaggaagaggatgctggcttctgccggagagttgcagaagggaaatgagctcgcccttccctccaagtacgtgaacttcctgtacctcgcctctcactatgaaaagttgaagggctctcctgaggacaacgagcagaagcagctcttcgtggagcagcacaagcactacctggacgaaattatcgagcagatctctgagttctccaagcgcgtgatattggccgacgccaacctcgacaaggtgctgtccgcctacaacaagcacagggataagcccattcgcgagcaggctgaaaacattatccacctgtttaccctcacaaacttgggagcccctgctgccttcaagtacttcgacaccaccattgacaggaagagatacacctccaccaaggaggtgctcgacgcaacactcatccaccaatccatcaccggcctctatgaaacaaggattgacttgtcccagctgggaggcgactctagagccgatcccaagaagaagagaaaggtgtaggttaacctagacttgtccatcttctggattggccaacttaattaatgtatgaaataaaaggatgcacacatagtgacatgctaatcactataatgtgggcatcaaagttgtgtgttatgtgtaattactagttatctgaataaaagagaaagagatcatccatatttcttatcctaaatgaatgtcacgtgtctttataattctttgatgaaccagatgcatttcattaaccaaatccatatacatataaatattaatcatatataattaatatcaattgggttagcaaaacaaatctagtctaggtgtgttttgcgaattcgatatcaagcttatcgataccgtcgagggggggcccggtaccggcgcgccgttctatagtgtcacctaaatcgtatgtgtatgatacataaggttatgtattaattgtagccgcgttctaacgacaatatgtccatatggtgcactctcagtacaatctgctctgatgccgcatagttaagccagccccgacacccgccaacacccgctgacgcgccctgacgggcttgtctgctcccggcatccgcttacagacaagctgtgaccgtctccgggagctgcatgtgtcagaggttttcaccgtcatcaccgaaacgcgcgagacgaaagggcctcgtgatacgcctatttttataggttaatgtcatgaccaaaatcccttaacgtgagttttcgttccactgagcgtcagaccccgtagaaaagatcaaaggatcttcttgagatcctttttttctgcgcgtaatctgctgcttgcaaacaaaaaaaccaccgctaccagcggtggtttgtttgccggatcaagagctaccaactctttttccgaaggtaactggcttcagcagagcgcagataccaaatactgtccttctagtgtagccgtagttaggccaccacttcaagaactctgtagcaccgcctacatacctcgctctgctaatcctgttaccagtggctgctgccagtggcgataagtcgtgtcttaccgggttggactcaagacgatagttaccggataaggcgcagcggtcgggctgaacggggggttcgtgcacacagcccagcttggagcgaacgacctacaccgaactgagatacctacagcgtgagcattgagaaagcgccacgcttcccgaagggagaaaggcggacaggtatccggtaagcggcagggtcggaacaggagagcgcacgagggagcttccagggggaaacgcctggtatctttatagtcctgtcgggtttcgccacctctgacttgagcgtcgatttttgtgatgctcgtcaggggggcggagcctatggaaaaacgccagcaacgcggcctttttacggttcctggccttttgctggccttttgctcacatgttctttcctgcgttatcccctgattctgtggataaccgtattaccgcctttgagtgagctgataccgctcgccgcagccgaacgaccgagcgcagcgagtcagtgagcgaggaagcggaagagcgcccaatacgcaaaccgcctctccccgcgcgttggccgattcattaatgcaggttgatcagatctcgatcccgcgaaattaatacgactcactatagggagaccacaacggtttccctctagaaataattttgtttaactttaagaaggagatatacccatggaaaagcctgaactcaccgcgacgtctgtcgagaagtttctgatcgaaaagttcgacagcgtctccgacctgatgcagctctcggagggcgaagaatctcgtgctttcagcttcgatgtaggagggcgtggatatgtcctgcgggtaaatagctgcgccgatggtttctacaaagatcgttatgtttatcggcactttgcatcggccgcgctcccgattccggaagtgcttgacattggggaattcagcgagagcctgacctattgcatctcccgccgtgcacagggtgtcacgttgcaagacctgcctgaaaccgaactgcccgctgttctgcagccggtcgcggaggctatggatgcgatcgctgcggccgatcttagccagacgagcgggttcggcccattcggaccgcaaggaatcggtcaatacactacatggcgtgatttcatatgcgcgattgctgatccccatgtgtatcactggcaaactgtgatggacgacaccgtcagtgcgtccgtcgcgcaggctctcgatgagctgatgctttgggccgaggactgccccgaagtccggcacctcgtgcacgcggatttcggctccaacaatgtcctgacggacaatggccgcataacagcggtcattgactggagcgaggcgatgttcggggattcccaatacgaggtcgccaacatcttcttctggaggccgtggttggcttgtatggagcagcagacgcgctacttcgagcggaggcatccggagcttgcaggatcgccgcggctccgggcgtatatgctccgcattggtcttgaccaactctatcagagcttggttgacggcaatttcgatgatgcagcttgggcgcagggtcgatgcgacgcaatcgtccgatccggagccgggactgtcgggcgtacacaaatcgcccgcagaagcgcggccgtctggaccgatggctgtgtagaagtactcgccgatagtggaaaccgacgccccagcactcgtccgagggcaaaggaatagtgaggtacagcttggatcgatccggctgctaacaaagcccgaaaggaagctgagttggctgctgccaccgctgagcaataactagcataaccccttggggcctctaaacgggtcttgaggggttttttgctgaaaggaggaactatatccggatgatcgggcgcgccggtac

SEQ ID NO: 472 - DNA, 1357 bp, Artificial sequence
  RTW1013A
ctagaagataaaccctcccccaaaacacaaattagaatgacatttcaagttccatgtatgtcactttcattctattatttttacaacttttagttacttaacagatgtcttgttcagcataaattataatttattctgtttttttttagggaacaactgttgtagacaacttgttgtatagtgaggatattcattacatgcttggtgcattaaggacccttggactgcgtgtggaagatgacaaaacaaccaaacaagcaattgttgaaggctgtgggggattgtttcccactagtaaggaatctaaagatgaaatcaatttattccttggaaatgctggtattgcaatgagatctttgacagcagctgttgttgctgcaggtggaaatgcaaggtctgttttttttttttttgttcagcataatctttgaattgttcctcgtataactaatcacaacagagtacgtgttcttcttcctgttataatctaaaaatctcatccagattagtcatcctttcttcttaaaaggaacctttaattatcaatgtatttatttaatatttaaattagcttgtcaaagtctagcatatacatattttgattatattctgagaaatgcacctgagggtgttcctcatgatctacttcaacctctgttattattagattttctatcatgattactggtttgagtctctaagtagaccatcttgatgttcaaaatatttcagctacgtacttgatggggtgccccgaatgagagagaggccaattggggatttggttgctggtcttaagcaacttggtgcagatgttgattgctttcttggcacaaactgtccacctgttcgtgtaaatgggaagggaggacttcctggcggaaaggtatggtttggatttcatttagaataaggtggagtaactttcctggatcaaaattctaatttaagaagcctccctgttttcctctctttagaataagactaagggtaggtttaggagttgggttttggagagaaatggaagggagagcaatttttttcttcttctaataaatattctttaatttgatacattttttaagtaaaagaatataaagatagattagcataacttaatgttttaatcttttatttatttttataaatattatatacctgtctatttaaaaatcaaatatttgtcctccattccctttcccttcaaaacctcagttccaaatataccgtagttgaattatattttggaaggcctattggttggagacttttccttttcagagattatccctcacctttattatagcctttctatttttaaacttcatatagacgccattcttggggcggccgcgat

SEQ ID NO: 473 - DNA, 1357 bp, Artificial sequence
  RTW1012A
ctagaagataaaccctcccccaaaacacaaattagaatgacatttcaagttccatgtatgtcactttcattctattatttttacaacttttagttacttaacagatgtcttgttcagcataaattataatttattctgtttttttttagggaacaactgttgtagacaacttgttgtatagtgaggatattcattacatgcttggtgcattaaggacccttggactgcgtgtggaagatgacaaaacaaccaaacaagcaattgttgaaggctgtgggggattgtttcccactagtaaggaatctaaagatgaaatcaatttattccttggaaatgctggtattgcaatgagatctttgacagcagctgtggttgctgcaggtggaaatgcaaggtctgttttttttttttttgttcagcataatctttgaattgttcctcgtataactaatcacaacagagtacgtgttcttcttcctgttataatctaaaaatctcatccagattagtcatcctttcttcttaaaaggaacctttaattatcaatgtatttatttaatatttaaattagcttgtcaaagtctagcatatacatattttgattatattctgagaaatgcacctgagggtgttcctcatgatctacttcaacctctgttattattagattttctatcatgattactggtttgagtctctaagtagaccatcttgatgttcaaaatatttcagctacgtacttgatggggtgccccgaatgagagagaggccaattggggatttggttgctggtcttaagcaacttggtgcagatgttgattgctttcttggcacaaactgtccacctgttcgtgtaaatgggaagggaggacttcctggcggaaaggtatggtttggatttcatttagaataaggtggagtaactttcctggatcaaaattctaatttaagaagcctccctgttttcctctctttagaataagactaagggtaggtttaggagttgggttttggagagaaatggaagggagagcaatttttttcttcttctaataaatattctttaatttgatacattttttaagtaaaagaatataaagatagattagcataacttaatgttttaatcttttatttatttttataaatattatatacctgtctatttaaaaatcaaatatttgtcctccattccctttcccttcaaaacctcagttccaaatataccgtagttgaattatattttggaaggcctattggttggagacttttccttttcagagattatccctcacctttattatagcctttctatttttaaacttcatatagacgccattcttggggcggccgcgat

SEQ ID NO: 474 - DNA, 30 bp, Artificial sequence
  primer, soy1-F1
ccactagtaaggaatctaaagatgaaatca

SEQ ID NO: 475 - DNA, 24 bp, Artificial sequence
  primer, soy1-R2
cctgcagcaaccacagctgctgtc

SEQ ID NO: 476 - DNA, 15 bp, Artificial sequence
  probe, soy1-T1(FAM-MGB
ctgcaatgcgtcctt

SEQ ID NO: 477 - DNA, 19 bp, Artificial sequence
  primer, cas9-F
ccttcttccaccgccttga

SEQ ID NO: 478 - DNA, 21 bp, Artificial sequence
  primer, Cas9-R
tgggtgtctctcgtgcttttt

SEQ ID NO: 479 - DNA, 19 bp, Artificial sequence
  probe, Cas9-T(FAM-MGB)
aatcattcctggtggagga

SEQ ID NO: 480 - DNA, 25 bp, Artificial sequence
  primer, pINII-99F
tgatgcccacattatagtgattagc

SEQ ID NO: 481 - DNA, 22 bp, Artificial sequence
  primer, pINII-13R
catcttctggattggccaactt

SEQ ID NO: 482 - DNA, 17 bp, Artificial sequence
  probe, pINII-69T(FAM-MGB)
actatgtgtgcatcctt

SEQ ID NO: 483 - DNA, 23 bp, Artificial sequence
  primer, SIP-130F
ttcaagttgggctttttcagaag

SEQ ID NO: 484 - DNA, 22 bp, Artificial sequence
  primer, SIP-198R
tctccttggtgctctcatcaca

SEQ ID NO: 485 - DNA, 15 bp, Artificial sequence
  probe, SIP-170T(VIC-MGB)
ctgcagcagaaccaa

SEQ ID NO: 486 - DNA, 24 bp, Artificial
  WOL569, Forward_primer
ggacccattaggtgagagcgtggg

SEQ ID NO: 487 - DNA, 19 bp, Artificial
  WOL876, Reverse_primer
cagctgctgtcaaagatct

SEQ ID NO: 488 - DNA, 29 bp, Artificial
  WOL570, Reverse_primer
tctaataataacagaggttgaagtagatc

SEQ ID NO: 489 - DNA, 4104 bp, Glycine max; identical to SEQ ID NO: 115

SEQ ID NO: 490 - DNA, 23 bp, Glycine max
gtttgtttgttgttgggtgtggg

SEQ ID NO: 491 - DNA, 22 bp, Glycine max
tgttgttgggtgtgggaatagg

SEQ ID NO: 492 - DNA, 9174 bp, Artificial sequence
  RTW1199
ccgggtgtgatttagtataaagtgaagtaatggtcaaaagaaaaagtgtaaaacgaagtacctagtaataagtaatattgaacaaaataaatggtaaagtgtcagatatataaaataggctttaataaaaggaagaaaaaaaacaaacaaaaaataggttgcaatggggcagagcagagtcatcatgaagctagaaaggctaccgatagataaactatagttaattaaatacattaaaaaatacttggatctttctcttaccctgtttatattgagacctgaaacttgagagagatacactaatcttgccttgttgtttcattccctaacttacaggactcagcgcatgtcatgtggtctcgttccccatttaagtcccacaccgtctaaacttattaaattattaatgtttataactagatgcacaacaacaaagcttgtttgtttgttgttgggtgtgttttagagctagaaatagcaagttaaaataaggctagtccgttatcaacttgaaaaagtggcaccgagtcggtgcttttttttgcggccgcaattggatcgggtttacttattttgtgggtatctatacttttattagatttttaatcaggctcctgatttctttttatttcgattgaattcctgaacttgtattattcagtagatcgaataaattataaaaagataaaatcataaaataatattttatcctatcaatcatattaaagcaatgaatatgtaaaattaatcttatctttattttaaaaaatcatataggtttagtatttttttaaaaataaagataggattagttttactattcactgcttattacttttaaaaaaatcataaaggtttagtatttttttaaaataaatataggaatagttttactattcactgctttaatagaaaaatagtttaaaatttaagatagttttaatcccagcatttgccacgtttgaacgtgagccgaaacgatgtcgttacattatcttaacctagctgaaacgatgtcgtcataatatcgccaaatgccaactggactacgtcgaacccacaaatcccacaaagcgcgtgaaatcaaatcgctcaaaccacaaaaaagaacaacgcgtttgttacacgctcaatcccacgcgagtagagcacagtaaccttcaaataagcgaatggggcataatcagaaatccgaaataaacctaggggcattatcggaaatgaaaagtagctcactcaatataaaaatctaggaaccctagttttcgttatcactctgtgctccctcgctctatttctcagtctctgtgtttgcggctgaggattccgaacgagtgaccttcttcgtttctcgcaaaggtaacagcctctgctcttgtctcttcgattcgatctatgcctgtctcttatttacgatgatgtttcttcggttatgtttttttatttatgctttatgctgttgatgttcggttgtttgtttcgctttgtttttgtggttcagttttttaggattcttttggtttttgaatcgattaatcggaagagattttcgagttatttggtgtgttggaggtgaatcttttttttgaggtcatagatctgttgtatttgtgttataaacatgcgactttgtatgattttttacgaggttatgatgttctggttgttttattatgaatctgttgagacagaaccatgatttttgttgatgttcgtttacactattaaaggtttgttttaacaggattaaaagttttttaagcatgttgaaggagtcttgtagatatgtaaccgtcgatagtttttttgtgggtttgttcacatgttatcaagcttaatcttttactatgtatgcgaccatatctggatccagcaaaggcgattttttaattccttgtgaaacttttgtaatatgaagttgaaattttgttattggtaaactataaatgtgtgaagttggagtatacctttaccttcttatttggctttgtgatagtttaatttatatgtattttgagttctgacttgtatttctttgaattgattctagtttaagtaatccatggcaccgaagaagaagcgcaaggtgatggacaaaaagtactcaatagggctcgacatagggactaactccgttggatgggccgtcatcaccgacgagtacaaggtgccctccaagaagttcaaggtgttgggaaacaccgacaggcacagcataaagaagaatttgatcggtgccctcctcttcgactccggagagaccgctgaggctaccaggctcaagaggaccgctagaaggcgctacaccagaaggaagaacagaatctgctacctgcaggagatcttctccaacgagatggccaaggtggacgactccttcttccaccgccttgaggaatcattcctggtggaggaggataaaaagcacgagagacacccaatcttcgggaacatcgtcgacgaggtggcctaccatgaaaagtaccctaccatctaccacctgaggaagaagctggtcgactctaccgacaaggctgacttgcgcttgatttacctggctctcgctcacatgataaagttccgcggacacttcctcattgagggagacctgaacccagacaactccgacgtggacaagctcttcatccagctcgttcagacctacaaccagcttttcgaggagaacccaatcaacgccagtggagttgacgccaaggctatcctctctgctcgtctgtcaaagtccaggaggcttgagaacttgattgcccagctgcctggcgaaaagaagaacggactgttcggaaacttgatcgctctctccctgggattgactcccaacttcaagtccaacttcgacctcgccgaggacgctaagttgcagttgtctaaagacacctacgacgatgacctcgacaacttgctggcccagataggcgaccaatacgccgatctcttcctcgccgctaagaacttgtccgacgcaatcctgctgtccgacatcctgagagtcaacactgagattaccaaagctcctctgtctgcttccatgattaagcgctacgacgagcaccaccaagatctgaccctgctcaaggccctggtgagacagcagctgcccgagaagtacaaggagatctttttcgaccagtccaagaacggctacgccggatacattgacggaggcgcctcccaggaagagttctacaagttcatcaagcccatccttgagaagatggacggtaccgaggagctgttggtgaagttgaacagagaggacctgttgaggaagcagagaaccttcgacaacggaagcatccctcaccaaatccacctgggagagctccacgccatcttgaggaggcaggaggatttctatcccttcctgaaggacaaccgcgagaagattgagaagatcttgaccttcagaattccttactacgtcgggccactcgccagaggaaactctaggttcgcctggatgacccgcaaatctgaagagaccattactccctggaacttcgaggaagtcgtggacaagggcgcttccgctcagtctttcatcgagaggatgaccaacttcgataaaaatctgcccaacgagaaggtgctgcccaagcactccctgttgtacgagtatttcacagtgtacaacgagctcaccaaggtgaagtacgtcacagagggaatgaggaagcctgccttcttgtccggagagcagaagaaggccatcgtcgacctgctcttcaagaccaacaggaaggtgactgtcaagcagctgaaggaggactacttcaagaagatcgagtgcttcgactccgtcgagatctctggtgtcgaggacaggttcaacgcctcccttgggacttaccacgatctgctcaagattattaaagacaaggacttcctggacaacgaggagaacgaggacatccttgaggacatcgtgctcaccctgaccttgttcgaagacagggaaatgatcgaagagaggctcaagacctacgcccacctcttcgacgacaaggtgatgaaacagctgaagagacgcagatataccggctggggaaggctctcccgcaaattgatcaacgggatcagggacaagcagtcagggaagactatactcgacttcctgaagtccgacggattcgccaacaggaacttcatgcagctcattcacgacgactccttgaccttcaaggaggacatccagaaggctcaggtgtctggacagggtgactccttgcatgagcacattgctaacttggccggctctcccgctattaagaagggcattttgcagaccgtgaaggtcgttgacgagctcgtgaaggtgatgggacgccacaagccagagaacatcgttattgagatggctcgcgagaaccaaactacccagaaagggcagaagaattcccgcgagaggatgaagcgcattgaggagggcataaaagagcttggctctcagatcctcaaggagcaccccgtcgagaacactcagctgcagaacgagaagctgtacctgtactacctccaaaacggaagggacatgtacgtggaccaggagctggacatcaacaggttgtccgactacgacgtcgaccacatcgtgcctcagtccttcctgaaggatgactccatcgacaataaagtgctgacacgctccgataaaaatagaggcaagtccgacaacgtcccctccgaggaggtcgtgaagaagatgaaaaactactggagacagctcttgaacgccaagctcatcacccagcgtaagttcgacaacctgactaaggctgagagaggaggattgtccgagctcgataaggccggattcatcaagagacagctcgtcgaaacccgccaaattaccaagcacgtggcccaaattctggattcccgcatgaacaccaagtacgatgaaaatgacaagctgatccgcgaggtcaaggtgatcaccttgaagtccaagctggtctccgacttccgcaaggacttccagttctacaaggtgagggagatcaacaactaccaccacgcacacgacgcctacctcaacgctgtcgttggaaccgccctcatcaaaaaatatcctaagctggagtctgagttcgtctacggcgactacaaggtgtacgacgtgaggaagatgatcgctaagtctgagcaggagatcggcaaggccaccgccaagtacttcttctactccaacatcatgaacttcttcaagaccgagatcactctcgccaacggtgagatcaggaagcgcccactgatcgagaccaacggtgagactggagagatcgtgtgggacaaagggagggatttcgctactgtgaggaaggtgctctccatgcctcaggtgaacatcgtcaagaagaccgaagttcagaccggaggattctccaaggagtccatcctccccaagagaaactccgacaagctgatcgctagaaagaaagactgggaccctaagaagtacggaggcttcgattctcctaccgtggcctactctgtgctggtcgtggccaaggtggagaagggcaagtccaagaagctgaaatccgtcaaggagctcctcgggattaccatcatggagaggagttccttcgagaagaaccctatcgacttcctggaggccaagggatataaagaggtgaagaaggacctcatcatcaagctgcccaagtactccctcttcgagttggagaacggaaggaagaggatgctggcttctgccggagagttgcagaagggaaatgagctcgcccttccctccaagtacgtgaacttcctgtacctcgcctctcactatgaaaagttgaagggctctcctgaggacaacgagcagaagcagctcttcgtggagcagcacaagcactacctggacgaaattatcgagcagatctctgagttctccaagcgcgtgatattggccgacgccaacctcgacaaggtgctgtccgcctacaacaagcacagggataagcccattcgcgagcaggctgaaaacattatccacctgtttaccctcacaaacttgggagcccctgctgccttcaagtacttcgacaccaccattgacaggaagagatacacctccaccaaggaggtgctcgacgcaacactcatccaccaatccatcaccggcctctatgaaacaaggattgacttgtcccagctgggaggcgactctagagccgatcccaagaagaagagaaaggtgaagagaccacgggaccgccacgatggcgagctgggaggccgcaagcgggcaaggtaggttaacctagacttgtccatcttctggattggccaacttaattaatgtatgaaataaaaggatgcacacatagtgacatgctaatcactataatgtgggcatcaaagttgtgtgttatgtgtaattactagttatctgaataaaagagaaagagatcatccatatttcttatcctaaatgaatgtcacgtgtctttataattctttgatgaaccagatgcatttcattaaccaaatccatatacatataaatattaatcatatataattaatatcaattgggttagcaaaacaaatctagtctaggtgtgttttgcgaattcgatatcaagcttatcgataccgtcgagggggggcccggtaccggcgcgccgttctatagtgtcacctaaatcgtatgtgtatgatacataaggttatgtattaattgtagccgcgttctaacgacaatatgtccatatggtgcactctcagtacaatctgctctgatgccgcatagttaagccagccccgacacccgccaacacccgctgacgcgccctgacgggcttgtctgctcccggcatccgcttacagacaagctgtgaccgtctccgggagctgcatgtgtcagaggttttcaccgtcatcaccgaaacgcgcgagacgaaagggcctcgtgatacgcctatttttataggttaatgtcatgaccaaaatcccttaacgtgagttttcgttccactgagcgtcagaccccgtagaaaagatcaaaggatcttcttgagatcctttttttctgcgcgtaatctgctgcttgcaaacaaaaaaaccaccgctaccagcggtggtttgtttgccggatcaagagctaccaactctttttccgaaggtaactggcttcagcagagcgcagataccaaatactgttcttctagtgtagccgtagttaggccaccacttcaagaactctgtagcaccgcctacatacctcgctctgctaatcctgttaccagtggctgctgccagtggcgataagtcgtgtcttaccgggttggactcaagacgatagttaccggataaggcgcagcggtcgggctgaacggggggttcgtgcacacagcccagcttggagcgaacgacctacaccgaactgagatacctacagcgtgagctatgagaaagcgccacgcttcccgaagggagaaaggcggacaggtatccggtaagcggcagggtcggaacaggagagcgcacgagggagcttccagggggaaacgcctggtatctttatagtcctgtcgggtttcgccacctctgacttgagcgtcgatttttgtgatgctcgtcaggggggcggagcctatggaaaaacgccagcaacgcggcctttttacggttcctggccttttgctggccttttgctcacatgttctttcctgcgttatcccctgattctgtggataaccgtattaccgcctttgagtgagctgataccgctcgccgcagccgaacgaccgagcgcagcgagtcagtgagcgaggaagcggaagagcgcccaatacgcaaaccgcctctccccgcgcgttggccgattcattaatgcaggttgatcagatctcgatcccgcgaaattaatacgactcactatagggagaccacaacggtttccctctagaaataattttgtttaactttaagaaggagatatacccatggaaaagcctgaactcaccgcgacgtctgtcgagaagtttctgatcgaaaagttcgacagcgtctccgacctgatgcagctctcggagggcgaagaatctcgtgctttcagcttcgatgtaggagggcgtggatatgtcctgcgggtaaatagctgcgccgatggtttctacaaagatcgttatgtttatcggcactttgcatcggccgcgctcccgattccggaagtgcttgacattggggaattcagcgagagcctgacctattgcatctcccgccgtgcacagggtgtcacgttgcaagacctgcctgaaaccgaactgcccgctgttctgcagccggtcgcggaggctatggatgcgatcgctgcggccgatcttagccagacgagcgggttcggcccattcggaccgcaaggaatcggtcaatacactacatggcgtgatttcatatgcgcgattgctgatccccatgtgtatcactggcaaactgtgatggacgacaccgtcagtgcgtccgtcgcgcaggctctcgatgagctgatgctttgggccgaggactgccccgaagtccggcacctcgtgcacgcggatttcggctccaacaatgtcctgacggacaatggccgcataacagcggtcattgactggagcgaggcgatgttcggggattcccaatacgaggtcgccaacatcttcttctggaggccgtggttggcttgtatggagcagcagacgcgctacttcgagcggaggcatccggagcttgcaggatcgccgcggctccgggcgtatatgctccgcattggtcttgaccaactctatcagagcttggttgacggcaatttcgatgatgcagcttgggcgcagggtcgatgcgacgcaatcgtccgatccggagccgggactgtcgggcgtacacaaatcgcccgcagaagcgcggccgtctggaccgatggctgtgtagaagtactcgccgatagtggaaaccgacgccccagcactcgtccgagggcaaaggaatagtgaggtacagcttggatcgatccggctgctaacaaagcccgaaaggaagctgagttggctgctgccaccgctgagcaataactagcataaccccttggggcctctaaacgggtcttgaggggttttttgctgaaaggaggaactatatccggatgctcgggcgcgccggtac

SEQ ID NO: 493 - DNA, 9174 bp, Artificial sequence
  RTW1200
ccgggtgtgatttagtataaagtgaagtaatggtcaaaagaaaaagtgtaaaacgaagtacctagtaataagtaatattgaacaaaataaatggtaaagtgtcagatatataaaataggctttaataaaaggaagaaaaaaaacaaacaaaaaataggttgcaatggggcagagcagagtcatcatgaagctagaaaggctaccgatagataaactatagttaattaaatacattaaaaaatacttggatctttctcttaccctgtttatattgagacctgaaacttgagagagatacactaatcttgccttgttgtttcattccctaacttacaggactcagcgcatgtcatgtggtctcgttccccatttaagtcccacaccgtctaaacttattaaattattaatgtttataactagatgcacaacaacaaagcttgtgttgttgggtgtgggaatgttttagagctagaaatagcaagttaaaataaggctagtccgttatcaacttgaaaaagtggcaccgagtcggtgcttttttttgcggccgcaattggatcgggtttacttattttgtgggtatctatacttttattagatttttaatcaggctcctgatttctttttatttcgattgaattcctgaacttgtattattcagtagatcgaataaattataaaaagataaaatcataaaataatattttatcctatcaatcatattaaagcaatgaatatgtaaaattaatcttatctttattttaaaaaatcatataggtttagtatttttttaaaaataaagataggattagttttactattcactgcttattacttttaaaaaaatcataaaggtttagtatttttttaaaataaatataggaatagttttactattcactgctttaatagaaaaatagtttaaaatttaagatagttttaatcccagcatttgccacgtttgaacgtgagccgaaacgatgtcgttacattatcttaacctagctgaaacgatgtcgtcataatatcgccaaatgccaactggactacgtcgaacccacaaatcccacaaagcgcgtgaaatcaaatcgctcaaaccacaaaaaagaacaacgcgtttgttacacgctcaatcccacgcgagtagagcacagtaaccttcaaataagcgaatggggcataatcagaaatccgaaataaacctaggggcattatcggaaatgaaaagtagctcactcaatataaaaatctaggaaccctagttttcgttatcactctgtgctccctcgctctatttctcagtctctgtgtttgcggctgaggattccgaacgagtgaccttcttcgtttctcgcaaaggtaacagcctctgctcttgtctcttcgattcgatctatgcctgtctcttatttacgatgatgtttcttcggttatgtttttttatttatgctttatgctgttgatgttcggttgtttgtttcgctttgtttttgtggttcagttttttaggattcttttggtttttgaatcgattaatcggaagagattttcgagttatttggtgtgttggaggtgaatcttttttttgaggtcatagatctgttgtatttgtgttataaacatgcgactttgtatgattttttacgaggttatgatgttctggttgttttattatgaatctgttgagacagaaccatgatttttgttgatgttcgtttacactattaaaggtttgttttaacaggattaaaagttttttaagcatgttgaaggagtcttgtagatatgtaaccgtcgatagtttttttgtgggtttgttcacatgttatcaagcttaatcttttactatgtatgcgaccatatctggatccagcaaaggcgattttttaattccttgtgaaacttttgtaatatgaagttgaaattttgttattggtaaactataaatgtgtgaagttggagtatacctttaccttcttatttggctttgtgatagtttaatttatatgtattttgagttctgacttgtatttctttgaattgattctagtttaagtaatccatggcaccgaagaagaagcgcaaggtgatggacaaaaagtactcaatagggctcgacatagggactaactccgttggatgggccgtcatcaccgacgagtacaaggtgccctccaagaagttcaaggtgttgggaaacaccgacaggcacagcataaagaagaatttgatcggtgccctcctcttcgactccggagagaccgctgaggctaccaggctcaagaggaccgctagaaggcgctacaccagaaggaagaacagaatctgctacctgcaggagatcttctccaacgagatggccaaggtggacgactccttcttccaccgccttgaggaatcattcctggtggaggaggataaaaagcacgagagacacccaatcttcgggaacatcgtcgacgaggtggcctaccatgaaaagtaccctaccatctaccacctgaggaagaagctggtcgactctaccgacaaggctgacttgcgcttgatttacctggctctcgctcacatgataaagttccgcggacacttcctcattgagggagacctgaacccagacaactccgacgtggacaagctcttcatccagctcgttcagacctacaaccagcttttcgaggagaacccaatcaacgccagtggagttgacgccaaggctatcctctctgctcgtctgtcaaagtccaggaggcttgagaacttgattgcccagctgcctggcgaaaagaagaacggactgttcggaaacttgatcgctctctccctgggattgactcccaacttcaagtccaacttcgacctcgccgaggacgctaagttgcagttgtctaaagacacctacgacgatgacctcgacaacttgctggcccagataggcgaccaatacgccgatctcttcctcgccgctaagaacttgtccgacgcaatcctgctgtccgacatcctgagagtcaacactgagattaccaaagctcctctgtctgcttccatgattaagcgctacgacgagcaccaccaagatctgaccctgctcaaggccctggtgagacagcagctgcccgagaagtacaaggagatctttttcgaccagtccaagaacggctacgccggatacattgacggaggcgcctcccaggaagagttctacaagttcatcaagcccatccttgagaagatggacggtaccgaggagctgttggtgaagttgaacagagaggacctgttgaggaagcagagaaccttcgacaacggaagcatccctcaccaaatccacctgggagagctccacgccatcttgaggaggcaggaggatttctatcccttcctgaaggacaaccgcgagaagattgagaagatcttgaccttcagaattccttactacgtcgggccactcgccagaggaaactctaggttcgcctggatgacccgcaaatctgaagagaccattactccctggaacttcgaggaagtcgtggacaagggcgcttccgctcagtctttcatcgagaggatgaccaacttcgataaaaatctgcccaacgagaaggtgctgcccaagcactccctgttgtacgagtatttcacagtgtacaacgagctcaccaaggtgaagtacgtcacagagggaatgaggaagcctgccttcttgtccggagagcagaagaaggccatcgtcgacctgctcttcaagaccaacaggaaggtgactgtcaagcagctgaaggaggactacttcaagaagatcgagtgcttcgactccgtcgagatctctggtgtcgaggacaggttcaacgcctcccttgggacttaccacgatctgctcaagattattaaagacaaggacttcctggacaacgaggagaacgaggacatccttgaggacatcgtgctcaccctgaccttgttcgaagacagggaaatgatcgaagagaggctcaagacctacgcccacctcttcgacgacaaggtgatgaaacagctgaagagacgcagatataccggctggggaaggctctcccgcaaattgatcaacgggatcagggacaagcagtcagggaagactatactcgacttcctgaagtccgacggattcgccaacaggaacttcatgcagctcattcacgacgactccttgaccttcaaggaggacatccagaaggctcaggtgtctggacagggtgactccttgcatgagcacattgctaacttggccggctctcccgctattaagaagggcattttgcagaccgtgaaggtcgttgacgagctcgtgaaggtgatgggacgccacaagccagagaacatcgttattgagatggctcgcgagaaccaaactacccagaaagggcagaagaattcccgcgagaggatgaagcgcattgaggagggcataaaagagcttggctctcagatcctcaaggagcaccccgtcgagaacactcagctgcagaacgagaagctgtacctgtactacctccaaaacggaagggacatgtacgtggaccaggagctggacatcaacaggttgtccgactacgacgtcgaccacatcgtgcctcagtccttcctgaaggatgactccatcgacaataaagtgctgacacgctccgataaaaatagaggcaagtccgacaacgtcccctccgaggaggtcgtgaagaagatgaaaaactactggagacagctcttgaacgccaagctcatcacccagcgtaagttcgacaacctgactaaggctgagagaggaggattgtccgagctcgataaggccggattcatcaagagacagctcgtcgaaacccgccaaattaccaagcacgtggcccaaattctggattcccgcatgaacaccaagtacgatgaaaatgacaagctgatccgcgaggtcaaggtgatcaccttgaagtccaagctggtctccgacttccgcaaggacttccagttctacaaggtgagggagatcaacaactaccaccacgcacacgacgcctacctcaacgctgtcgttggaaccgccctcatcaaaaaatatcctaagctggagtctgagttcgtctacggcgactacaaggtgtacgacgtgaggaagatgatcgctaagtctgagcaggagatcggcaaggccaccgccaagtacttcttctactccaacatcatgaacttcttcaagaccgagatcactctcgccaacggtgagatcaggaagcgcccactgatcgagaccaacggtgagactggagagatcgtgtgggacaaagggagggatttcgctactgtgaggaaggtgctctccatgcctcaggtgaacatcgtcaagaagaccgaagttcagaccggaggattctccaaggagtccatcctccccaagagaaactccgacaagctgatcgctagaaagaaagactgggaccctaagaagtacggaggcttcgattctcctaccgtggcctactctgtgctggtcgtggccaaggtggagaagggcaagtccaagaagctgaaatccgtcaaggagctcctcgggattaccatcatggagaggagttccttcgagaagaaccctatcgacttcctggaggccaagggatataaagaggtgaagaaggacctcatcatcaagctgcccaagtactccctcttcgagttggagaacggaaggaagaggatgctggcttctgccggagagttgcagaagggaaatgagctcgcccttccctccaagtacgtgaacttcctgtacctcgcctctcactatgaaaagttgaagggctctcctgaggacaacgagcagaagcagctcttcgtggagcagcacaagcactacctggacgaaattatcgagcagatctctgagttctccaagcgcgtgatattggccgacgccaacctcgacaaggtgctgtccgcctacaacaagcacagggataagcccattcgcgagcaggctgaaaacattatccacctgtttaccctcacaaacttgggagcccctgctgccttcaagtacttcgacaccaccattgacaggaagagatacacctccaccaaggaggtgctcgacgcaacactcatccaccaatccatcaccggcctctatgaaacaaggattgacttgtcccagctgggaggcgactctagagccgatcccaagaagaagagaaaggtgaagagaccacgggaccgccacgatggcgagctgggaggccgcaagcgggcaaggtaggttaacctagacttgtccatcttctggattggccaacttaattaatgtatgaaataaaaggatgcacacatagtgacatgctaatcactataatgtgggcatcaaagttgtgtgttatgtgtaattactagttatctgaataaaagagaaagagatcatccatatttcttatcctaaatgaatgtcacgtgtctttataattctttgatgaaccagatgcatttcattaaccaaatccatatacatataaatattaatcatatataattaatatcaattgggttagcaaaacaaatctagtctaggtgtgttttgcgaattcgatatcaagcttatcgataccgtcgagggggggcccggtaccggcgcgccgttctatagtgtcacctaaatcgtatgtgtatgatacataaggttatgtattaattgtagccgcgttctaacgacaatatgtccatatggtgcactctcagtacaatctgctctgatgccgcatagttaagccagccccgacacccgccaacacccgctgacgcgccctgacgggcttgtctgctcccggcatccgcttacagacaagctgtgaccgtctccgggagctgcatgtgtcagaggttttcaccgtcatcaccgaaacgcgcgagacgaaagggcctcgtgatacgcctatttttataggttaatgtcatgaccaaaatcccttaacgtgagttttcgttccactgagcgtcagaccccgtagaaaagatcaaaggatcttcttgagatcctttttttctgcgcgtaatctgctgcttgcaaacaaaaaaaccaccgctaccagcggtggtttgtttgccggatcaagagctaccaactctttttccgaaggtaactggcttcagcagagcgcagataccaaatactgttcttctagtgtagccgtagttaggccaccacttcaagaactctgtagcaccgcctacatacctcgctctgctaatcctgttaccagtggctgctgccagtggcgataagtcgtgtcttaccgggttggactcaagacgatagttaccggataaggcgcagcggtcgggctgaacggggggttcgtgcacacagcccagcttggagcgaacgacctacaccgaactgagatacctacagcgtgagctatgagaaagcgccacgcttcccgaagggagaaaggcggacaggtatccggtaagcggcagggtcggaacaggagagcgcacgagggagcttccagggggaaacgcctggtatctttatagtcctgtcgggtttcgccacctctgacttgagcgtcgatttttgtgatgctcgtcaggggggcggagcctatggaaaaacgccagcaacgcggcctttttacggttcctggccttttgctggccttttgctcacatgttctttcctgcgttatcccctgattctgtggataaccgtattaccgcctttgagtgagctgataccgctcgccgcagccgaacgaccgagcgcagcgagtcagtgagcgaggaagcggaagagcgcccaatacgcaaaccgcctctccccgcgcgttggccgattcattaatgcaggttgatcagatctcgatcccgcgaaattaatacgactcactatagggagaccacaacggtttccctctagaaataattttgtttaactttaagaaggagatatacccatggaaaagcctgaactcaccgcgacgtctgtcgagaagtttctgatcgaaaagttcgacagcgtctccgacctgatgcagctctcggagggcgaagaatctcgtgctttcagcttcgatgtaggagggcgtggatatgtcctgcgggtaaatagctgcgccgatggtttctacaaagatcgttatgtttatcggcactttgcatcggccgcgctcccgattccggaagtgcttgacattggggaattcagcgagagcctgacctattgcatctcccgccgtgcacagggtgtcacgttgcaagacctgcctgaaaccgaactgcccgctgttctgcagccggtcgcggaggctatggatgcgatcgctgcggccgatcttagccagacgagcgggttcggcccattcggaccgcaaggaatcggtcaatacactacatggcgtgatttcatatgcgcgattgctgatccccatgtgtatcactggcaaactgtgatggacgacaccgtcagtgcgtccgtcgcgcaggctctcgatgagctgatgctttgggccgaggactgccccgaagtccggcacctcgtgcacgcggatttcggctccaacaatgtcctgacggacaatggccgcataacagcggtcattgactggagcgaggcgatgttcggggattcccaatacgaggtcgccaacatcttcttctggaggccgtggttggcttgtatggagcagcagacgcgctacttcgagcggaggcatccggagcttgcaggatcgccgcggctccgggcgtatatgctccgcattggtcttgaccaactctatcagagcttggttgacggcaatttcgatgatgcagcttgggcgcagggtcgatgcgacgcaatcgtccgatccggagccgggactgtcgggcgtacacaaatcgcccgcagaagcgcggccgtctggaccgatggctgtgtagaagtactcgccgatagtggaaaccgacgccccagcactcgtccgagggcaaaggaatagtgaggtacagcttggatcgatccggctgctaacaaagcccgaaaggaagctgagttggctgctgccaccgctgagcaataactagcataaccccttggggcctctaaacgggtcttgaggggttttttgctgaaaggaggaactatatccggatgctcgggcgcgccggtac

SEQ ID NO: 494 - DNA, 3175 bp, Artificial sequence
  RTW1190A
cgaattctacaggtcactaataccatctaagtagttggttcatagtgactgcatatgtaaaaattatccttattttaaggaaattaaaaattatcatatatatataagttttaaattaattatcttatatatgtaccaaaaagttttaaagcaattattataaaaattaataaatttatcatataaaataatttataattaaattttaaattatcaattcattaaattaaattatttaaaatttttgaatgataatataataattttatcctctactaagtcccaacgtttcctattttattccacttttagcaataaattttgtcataaacacttataacaaaaaaagtaagtaaaaaataaaaaaaagtttttcaataaagtataaactaatttgtataaacttttagaaaaaataaagttatacattgataatataaattttttacataattatccgatcaactcattatatatgataaatttattgattttttaaaataattatcttaaaataatttaaacaatgatttgcaattagatgataatataaaattattttacacactacatgtattaaactcaaacttttatatattagtttttctaaaaactaatttttaactcaaaaaaaatgttacttataattttcttatcttctttttttataagtattttttaagaaatttattgaaacatgaccatgcttgggtcaataatactactctcttagacaccaaacaacccttcccaaactataatctaatccaaaagccatcattcattttccttggtaggtaaagttccaagaccttcaccaactttttcactcaattgttttggtgtaagcaattcgacatgtgttagtgttagttggcaaccaaaaatccctttatgtgactcaatccaacaaccactcacaccaccaacccccataaccatttctcacaatacccttcatttacacattatcatcaccaaaaataaataaaaaaaacctctcatttcagagagagagagagagacttcacagaccaaagtgcagagaacaacaaagttcacaactttaaggaaaattgaaatggcccaagtgagcagagtgcacaatcttgctcaaagcactcaaatttttggccattcttccaactccaacaaactcaaatcggtgaattcggtttcattgaggccacgcctttggggggcctcaaaatctcgcatcccgatgcataaaaatggaagctttatgggaaattttaatgtggggaagggaaattccggcgtgtttaaggtttctgcatcggtcgccgccgcagagaagccgtcaacgtcgccggagatcgtgttggaacccatcaaagacttctcgggtaccatcacattgccagggtccaagtctctgtccaatcgaattttgcttcttgctgctctctctgaggttcgtagatttcttccgtttttttttcttcttctttattgtttgttctacatcagcatgatgttgatttgattgtgttttctatcgtttcatcgattataaattttcataatcagaagattcagcttttattaatgcaagaacgtccttaattgatgattttataaccgtaaattaggtctaattagagtttttttcataaagattttcagatccgtttacaacaagccttaattgttgattctgtagtcgtagattaaggtttttttcatgaactacttcagatccgttaaacaacagccttatttgttgatacttcagtcgtttttcaagaaattgttcagatccgttgataaaagccttattcgttgattctgtatggtatttcaagagatattgctcaggtcctttagcaactaccttatttgttgattctgtggccatagattaggattttttttcacgaaattgcttcttgaaattacgtgatggattttgattctgatttatcttgtgattgttgactctacagggaacaactgttgtagacaacttgttgtatagtgaggatattcattacatgcttggtgcattaaggacccttggactgcgtgtggaagatgacaaaacaaccaaacaagcaattgttgaaggctgtgggggattgtttcccactagtaaggaatctaaagatgaaatcaatttattccttggaaatgctggtattgcaatgagatctttgacagcagctgttgttgctgcaggtggaaatgcaaggtctgttttttttttttttgttcagcataatctttgaattgttcctcgtataactaatcacaacagagtacgtgttcttcttcctgttataatctaaaaatctcatccagattagtcatcctttcttcttaaaaggaacctttaattatcaatgtatttatttaatatttaaattagcttgtcaaagtctagcatatacatattttgattatattctgagaaatgcacctgagggtgttcctcatgatctacttcaacctctgttattattagattttctatcatgattactggtttgagtctctaagtagaccatcttgatgttcaaaatatttcagctacgtacttgatggggtgccccgaatgagagagaggccaattggggatttggttgctggtcttaagcaacttggtgcagatgttgattgctttcttggcacaaactgtccacctgttcgtgtaaatgggaagggaggacttcctggcggaaaggtatggtttggatttcatttagaataaggtggagtaactttcctggatcaaaattctaatttaagaagcctccctgttttcctctctttagaataagactaagggtaggtttaggagttgggttttggagagaaatggaagggagagcaatttttttcttcttctaataaatattctttaatttgatacattttttaagtaaaagaatataaagatagattagcataacttaatgttttaatcttttatttatttttataaatattatatacctgtctatttaaaaatcaaatatttgtcctccattccctttcccttcaaaacctcagttccaaatataccgtagttgaattatattttggaaggcctattggttggagacttttccttttcagagattatccctcacctttattatagcctttctatttttaaacttcatatagacgccattcttggggcggccgcgat

SEQ ID NO: 495 - DNA, 23 bp, Artificial sequence
  primer, soy1-F3
gtttgtttgttgttgggtgtggg

SEQ ID NO: 496 - DNA, 25 bp, Artificial sequence
  primer, soy1-R3
gacatgatgcttcattttcacagaa

SEQ ID NO: 497 - DNA, 18 bp, Artificial sequence
  robe, soy1-T2(FAM-MGB)
tgtgtagagtggattttg

SEQ ID NO: 498 - DNA, 22 bp, Artificial sequence
  primer, soy1-F2
tgttgttgggtgtgggaatagg

SEQ ID NO: 499 - DNA, 31 bp, Artificial sequence
  WOL1001, Forward_primer
aggtttaattttatataatgttagcatacag

SEQ ID NO: 500 - DNA, 28 bp, Artificial sequence
  500 WOL1002, Reverse_primer
atcaacatcatgctgatgtagaacaaac

SEQ ID NO: 501 - DNA, 29 bp, Artificial sequence
  501 WOL1003, Forward_primer
attctgatttatcttgtgattgttgactc

SEQ ID NO: 502 - DNA, 27 bp, Artificial sequence
  WOL1004, Reverse_primer
atttactttggagagaataaggagggg

SEQ ID NO: 503 - DNA, 23 bp, Glycine mac
gaaacgttgggacttagtagagg

SEQ ID NO: 504 - DNA, 23 bp, Glycine max
ggaataaaataggaaacgttggg

SEQ ID NO: 505 - DNA, 9174 bp, Artificial sequence
  RTW1201
ccgggtgtgatttagtataaagtgaagtaatggtcaaaagaaaaagtgtaaaacgaagtacctagtaataagtaatattgaacaaaataaatggtaaagtgtcagatatataaaataggctttaataaaaggaagaaaaaaaacaaacaaaaaataggttgcaatggggcagagcagagtcatcatgaagctagaaaggctaccgatagataaactatagttaattaaatacattaaaaaatacttggatctttctcttaccctgtttatattgagacctgaaacttgagagagatacactaatcttgccttgttgtttcattccctaacttacaggactcagcgcatgtcatgtggtctcgttccccatttaagtcccacaccgtctaaacttattaaattattaatgtttataactagatgcacaacaacaaagcttgaaacgttgggacttagtaggttttagagctagaaatagcaagttaaaataaggctagtccgttatcaacttgaaaaagtggcaccgagtcggtgcttttttttgcggccgcaattggatcgggtttacttattttgtgggtatctatacttttattagatttttaatcaggctcctgatttctttttatttcgattgaattcctgaacttgtattattcagtagatcgaataaattataaaaagataaaatcataaaataatattttatcctatcaatcatattaaagcaatgaatatgtaaaattaatcttatctttattttaaaaaatcatataggtttagtatttttttaaaaataaagataggattagttttactattcactgcttattacttttaaaaaaatcataaaggtttagtatttttttaaaataaatataggaatagttttactattcactgctttaatagaaaaatagtttaaaatttaagatagttttaatcccagcatttgccacgtttgaacgtgagccgaaacgatgtcgttacattatcttaacctagctgaaacgatgtcgtcataatatcgccaaatgccaactggactacgtcgaacccacaaatcccacaaagcgcgtgaaatcaaatcgctcaaaccacaaaaaagaacaacgcgtttgttacacgctcaatcccacgcgagtagagcacagtaaccttcaaataagcgaatggggcataatcagaaatccgaaataaacctaggggcattatcggaaatgaaaagtagctcactcaatataaaaatctaggaaccctagttttcgttatcactctgtgctccctcgctctatttctcagtctctgtgtttgcggctgaggattccgaacgagtgaccttcttcgtttctcgcaaaggtaacagcctctgctcttgtctcttcgattcgatctatgcctgtctcttatttacgatgatgtttcttcggttatgtttttttatttatgctttatgctgttgatgttcggttgtttgtttcgctttgtttttgtggttcagttttttaggattcttttggtttttgaatcgattaatcggaagagattttcgagttatttggtgtgttggaggtgaatcttttttttgaggtcatagatctgttgtatttgtgttataaacatgcgactttgtatgattttttacgaggttatgatgttctggttgttttattatgaatctgttgagacagaaccatgatttttgttgatgttcgtttacactattaaaggtttgttttaacaggattaaaagttttttaagcatgttgaaggagtcttgtagatatgtaaccgtcgatagtttttttgtgggtttgttcacatgttatcaagcttaatcttttactatgtatgcgaccatatctggatccagcaaaggcgattttttaattccttgtgaaacttttgtaatatgaagttgaaattttgttattggtaaactataaatgtgtgaagttggagtatacctttaccttcttatttggctttgtgatagtttaatttatatgtattttgagttctgacttgtatttctttgaattgattctagtttaagtaatccatggcaccgaagaagaagcgcaaggtgatggacaaaaagtactcaatagggctcgacatagggactaactccgttggatgggccgtcatcaccgacgagtacaaggtgccctccaagaagttcaaggtgttgggaaacaccgacaggcacagcataaagaagaatttgatcggtgccctcctcttcgactccggagagaccgctgaggctaccaggctcaagaggaccgctagaaggcgctacaccagaaggaagaacagaatctgctacctgcaggagatcttctccaacgagatggccaaggtggacgactccttcttccaccgccttgaggaatcattcctggtggaggaggataaaaagcacgagagacacccaatcttcgggaacatcgtcgacgaggtggcctaccatgaaaagtaccctaccatctaccacctgaggaagaagctggtcgactctaccgacaaggctgacttgcgcttgatttacctggctctcgctcacatgataaagttccgcggacacttcctcattgagggagacctgaacccagacaactccgacgtggacaagctcttcatccagctcgttcagacctacaaccagcttttcgaggagaacccaatcaacgccagtggagttgacgccaaggctatcctctctgctcgtctgtcaaagtccaggaggcttgagaacttgattgcccagctgcctggcgaaaagaagaacggactgttcggaaacttgatcgctctctccctgggattgactcccaacttcaagtccaacttcgacctcgccgaggacgctaagttgcagttgtctaaagacacctacgacgatgacctcgacaacttgctggcccagataggcgaccaatacgccgatctcttcctcgccgctaagaacttgtccgacgcaatcctgctgtccgacatcctgagagtcaacactgagattaccaaagctcctctgtctgcttccatgattaagcgctacgacgagcaccaccaagatctgaccctgctcaaggccctggtgagacagcagctgcccgagaagtacaaggagatctttttcgaccagtccaagaacggctacgccggatacattgacggaggcgcctcccaggaagagttctacaagttcatcaagcccatccttgagaagatggacggtaccgaggagctgttggtgaagttgaacagagaggacctgttgaggaagcagagaaccttcgacaacggaagcatccctcaccaaatccacctgggagagctccacgccatcttgaggaggcaggaggatttctatcccttcctgaaggacaaccgcgagaagattgagaagatcttgaccttcagaattccttactacgtcgggccactcgccagaggaaactctaggttcgcctggatgacccgcaaatctgaagagaccattactccctggaacttcgaggaagtcgtggacaagggcgcttccgctcagtctttcatcgagaggatgaccaacttcgataaaaatctgcccaacgagaaggtgctgcccaagcactccctgttgtacgagtatttcacagtgtacaacgagctcaccaaggtgaagtacgtcacagagggaatgaggaagcctgccttcttgtccggagagcagaagaaggccatcgtcgacctgctcttcaagaccaacaggaaggtgactgtcaagcagctgaaggaggactacttcaagaagatcgagtgcttcgactccgtcgagatctctggtgtcgaggacaggttcaacgcctcccttgggacttaccacgatctgctcaagattattaaagacaaggacttcctggacaacgaggagaacgaggacatccttgaggacatcgtgctcaccctgaccttgttcgaagacagggaaatgatcgaagagaggctcaagacctacgcccacctcttcgacgacaaggtgatgaaacagctgaagagacgcagatataccggctggggaaggctctcccgcaaattgatcaacgggatcagggacaagcagtcagggaagactatactcgacttcctgaagtccgacggattcgccaacaggaacttcatgcagctcattcacgacgactccttgaccttcaaggaggacatccagaaggctcaggtgtctggacagggtgactccttgcatgagcacattgctaacttggccggctctcccgctattaagaagggcattttgcagaccgtgaaggtcgttgacgagctcgtgaaggtgatgggacgccacaagccagagaacatcgttattgagatggctcgcgagaaccaaactacccagaaagggcagaagaattcccgcgagaggatgaagcgcattgaggagggcataaaagagcttggctctcagatcctcaaggagcaccccgtcgagaacactcagctgcagaacgagaagctgtacctgtactacctccaaaacggaagggacatgtacgtggaccaggagctggacatcaacaggttgtccgactacgacgtcgaccacatcgtgcctcagtccttcctgaaggatgactccatcgacaataaagtgctgacacgctccgataaaaatagaggcaagtccgacaacgtcccctccgaggaggtcgtgaagaagatgaaaaactactggagacagctcttgaacgccaagctcatcacccagcgtaagttcgacaacctgactaaggctgagagaggaggattgtccgagctcgataaggccggattcatcaagagacagctcgtcgaaacccgccaaattaccaagcacgtggcccaaattctggattcccgcatgaacaccaagtacgatgaaaatgacaagctgatccgcgaggtcaaggtgatcaccttgaagtccaagctggtctccgacttccgcaaggacttccagttctacaaggtgagggagatcaacaactaccaccacgcacacgacgcctacctcaacgctgtcgttggaaccgccctcatcaaaaaatatcctaagctggagtctgagttcgtctacggcgactacaaggtgtacgacgtgaggaagatgatcgctaagtctgagcaggagatcggcaaggccaccgccaagtacttcttctactccaacatcatgaacttcttcaagaccgagatcactctcgccaacggtgagatcaggaagcgcccactgatcgagaccaacggtgagactggagagatcgtgtgggacaaagggagggatttcgctactgtgaggaaggtgctctccatgcctcaggtgaacatcgtcaagaagaccgaagttcagaccggaggattctccaaggagtccatcctccccaagagaaactccgacaagctgatcgctagaaagaaagactgggaccctaagaagtacggaggcttcgattctcctaccgtggcctactctgtgctggtcgtggccaaggtggagaagggcaagtccaagaagctgaaatccgtcaaggagctcctcgggattaccatcatggagaggagttccttcgagaagaaccctatcgacttcctggaggccaagggatataaagaggtgaagaaggacctcatcatcaagctgcccaagtactccctcttcgagttggagaacggaaggaagaggatgctggcttctgccggagagttgcagaagggaaatgagctcgcccttccctccaagtacgtgaacttcctgtacctcgcctctcactatgaaaagttgaagggctctcctgaggacaacgagcagaagcagctcttcgtggagcagcacaagcactacctggacgaaattatcgagcagatctctgagttctccaagcgcgtgatattggccgacgccaacctcgacaaggtgctgtccgcctacaacaagcacagggataagcccattcgcgagcaggctgaaaacattatccacctgtttaccctcacaaacttgggagcccctgctgccttcaagtacttcgacaccaccattgacaggaagagatacacctccaccaaggaggtgctcgacgcaacactcatccaccaatccatcaccggcctctatgaaacaaggattgacttgtcccagctgggaggcgactctagagccgatcccaagaagaagagaaaggtgaagagaccacgggaccgccacgatggcgagctgggaggccgcaagcgggcaaggtaggttaacctagacttgtccatcttctggattggccaacttaattaatgtatgaaataaaaggatgcacacatagtgacatgctaatcactataatgtgggcatcaaagttgtgtgttatgtgtaattactagttatctgaataaaagagaaagagatcatccatatttcttatcctaaatgaatgtcacgtgtctttataattctttgatgaaccagatgcatttcattaaccaaatccatatacatataaatattaatcatatataattaatatcaattgggttagcaaaacaaatctagtctaggtgtgttttgcgaattcgatatcaagcttatcgataccgtcgagggggggcccggtaccggcgcgccgttctatagtgtcacctaaatcgtatgtgtatgatacataaggttatgtattaattgtagccgcgttctaacgacaatatgtccatatggtgcactctcagtacaatctgctctgatgccgcatagttaagccagccccgacacccgccaacacccgctgacgcgccctgacgggcttgtctgctcccggcatccgcttacagacaagctgtgaccgtctccgggagctgcatgtgtcagaggttttcaccgtcatcaccgaaacgcgcgagacgaaagggcctcgtgatacgcctatttttataggttaatgtcatgaccaaaatcccttaacgtgagttttcgttccactgagcgtcagaccccgtagaaaagatcaaaggatcttcttgagatcctttttttctgcgcgtaatctgctgcttgcaaacaaaaaaaccaccgctaccagcggtggtttgtttgccggatcaagagctaccaactctttttccgaaggtaactggcttcagcagagcgcagataccaaatactgttcttctagtgtagccgtagttaggccaccacttcaagaactctgtagcaccgcctacatacctcgctctgctaatcctgttaccagtggctgctgccagtggcgataagtcgtgtcttaccgggttggactcaagacgatagttaccggataaggcgcagcggtcgggctgaacggggggttcgtgcacacagcccagcttggagcgaacgacctacaccgaactgagatacctacagcgtgagctatgagaaagcgccacgcttcccgaagggagaaaggcggacaggtatccggtaagcggcagggtcggaacaggagagcgcacgagggagcttccagggggaaacgcctggtatctttatagtcctgtcgggtttcgccacctctgacttgagcgtcgatttttgtgatgctcgtcaggggggcggagcctatggaaaaacgccagcaacgcggcctttttacggttcctggccttttgctggccttttgctcacatgttctttcctgcgttatcccctgattctgtggataaccgtattaccgcctttgagtgagctgataccgctcgccgcagccgaacgaccgagcgcagcgagtcagtgagcgaggaagcggaagagcgcccaatacgcaaaccgcctctccccgcgcgttggccgattcattaatgcaggttgatcagatctcgatcccgcgaaattaatacgactcactatagggagaccacaacggtttccctctagaaataattttgtttaactttaagaaggagatatacccatggaaaagcctgaactcaccgcgacgtctgtcgagaagtttctgatcgaaaagttcgacagcgtctccgacctgatgcagctctcggagggcgaagaatctcgtgctttcagcttcgatgtaggagggcgtggatatgtcctgcgggtaaatagctgcgccgatggtttctacaaagatcgttatgtttatcggcactttgcatcggccgcgctcccgattccggaagtgcttgacattggggaattcagcgagagcctgacctattgcatctcccgccgtgcacagggtgtcacgttgcaagacctgcctgaaaccgaactgcccgctgttctgcagccggtcgcggaggctatggatgcgatcgctgcggccgatcttagccagacgagcgggttcggcccattcggaccgcaaggaatcggtcaatacactacatggcgtgatttcatatgcgcgattgctgatccccatgtgtatcactggcaaactgtgatggacgacaccgtcagtgcgtccgtcgcgcaggctctcgatgagctgatgctttgggccgaggactgccccgaagtccggcacctcgtgcacgcggatttcggctccaacaatgtcctgacggacaatggccgcataacagcggtcattgactggagcgaggcgatgttcggggattcccaatacgaggtcgccaacatcttcttctggaggccgtggttggcttgtatggagcagcagacgcgctacttcgagcggaggcatccggagcttgcaggatcgccgcggctccgggcgtatatgctccgcattggtcttgaccaactctatcagagcttggttgacggcaatttcgatgatgcagcttgggcgcagggtcgatgcgacgcaatcgtccgatccggagccgggactgtcgggcgtacacaaatcgcccgcagaagcgcggccgtctggaccgatggctgtgtagaagtactcgccgatagtggaaaccgacgccccagcactcgtccgagggcaaaggaatagtgaggtacagcttggatcgatccggctgctaacaaagcccgaaaggaagctgagttggctgctgccaccgctgagcaataactagcataaccccttggggcctctaaacgggtcttgaggggttttttgctgaaaggaggaactatatccggatgctcgggcgcgccggtac

SEQ ID NO: 506 - DNA, 9174 bp, Artificial sequence
  RTW1202
ccgggtgtgatttagtataaagtgaagtaatggtcaaaagaaaaagtgtaaaacgaagtacctagtaataagtaatattgaacaaaataaatggtaaagtgtcagatatataaaataggctttaataaaaggaagaaaaaaaacaaacaaaaaataggttgcaatggggcagagcagagtcatcatgaagctagaaaggctaccgatagataaactatagttaattaaatacattaaaaaatacttggatctttctcttaccctgtttatattgagacctgaaacttgagagagatacactaatcttgccttgttgtttcattccctaacttacaggactcagcgcatgtcatgtggtctcgttccccatttaagtcccacaccgtctaaacttattaaattattaatgtttataactagatgcacaacaacaaagcttggaataaaataggaaacgttgttttagagctagaaatagcaagttaaaataaggctagtccgttatcaacttgaaaaagtggcaccgagtcggtgcttttttttgcggccgcaattggatcgggtttacttattttgtgggtatctatacttttattagatttttaatcaggctcctgatttctttttatttcgattgaattcctgaacttgtattattcagtagatcgaataaattataaaaagataaaatcataaaataatattttatcctatcaatcatattaaagcaatgaatatgtaaaattaatcttatctttattttaaaaaatcatataggtttagtatttttttaaaaataaagataggattagttttactattcactgcttattacttttaaaaaaatcataaaggtttagtatttttttaaaataaatataggaatagttttactattcactgctttaatagaaaaatagtttaaaatttaagatagttttaatcccagcatttgccacgtttgaacgtgagccgaaacgatgtcgttacattatcttaacctagctgaaacgatgtcgtcataatatcgccaaatgccaactggactacgtcgaacccacaaatcccacaaagcgcgtgaaatcaaatcgctcaaaccacaaaaaagaacaacgcgtttgttacacgctcaatcccacgcgagtagagcacagtaaccttcaaataagcgaatggggcataatcagaaatccgaaataaacctaggggcattatcggaaatgaaaagtagctcactcaatataaaaatctaggaaccctagttttcgttatcactctgtgctccctcgctctatttctcagtctctgtgtttgcggctgaggattccgaacgagtgaccttcttcgtttctcgcaaaggtaacagcctctgctcttgtctcttcgattcgatctatgcctgtctcttatttacgatgatgtttcttcggttatgtttttttatttatgctttatgctgttgatgttcggttgtttgtttcgctttgtttttgtggttcagttttttaggattcttttggtttttgaatcgattaatcggaagagattttcgagttatttggtgtgttggaggtgaatcttttttttgaggtcatagatctgttgtatttgtgttataaacatgcgactttgtatgattttttacgaggttatgatgttctggttgttttattatgaatctgttgagacagaaccatgatttttgttgatgttcgtttacactattaaaggtttgttttaacaggattaaaagttttttaagcatgttgaaggagtcttgtagatatgtaaccgtcgatagtttttttgtgggtttgttcacatgttatcaagcttaatcttttactatgtatgcgaccatatctggatccagcaaaggcgattttttaattccttgtgaaacttttgtaatatgaagttgaaattttgttattggtaaactataaatgtgtgaagttggagtatacctttaccttcttatttggctttgtgatagtttaatttatatgtattttgagttctgacttgtatttctttgaattgattctagtttaagtaatccatggcaccgaagaagaagcgcaaggtgatggacaaaaagtactcaatagggctcgacatagggactaactccgttggatgggccgtcatcaccgacgagtacaaggtgccctccaagaagttcaaggtgttgggaaacaccgacaggcacagcataaagaagaatttgatcggtgccctcctcttcgactccggagagaccgctgaggctaccaggctcaagaggaccgctagaaggcgctacaccagaaggaagaacagaatctgctacctgcaggagatcttctccaacgagatggccaaggtggacgactccttcttccaccgccttgaggaatcattcctggtggaggaggataaaaagcacgagagacacccaatcttcgggaacatcgtcgacgaggtggcctaccatgaaaagtaccctaccatctaccacctgaggaagaagctggtcgactctaccgacaaggctgacttgcgcttgatttacctggctctcgctcacatgataaagttccgcggacacttcctcattgagggagacctgaacccagacaactccgacgtggacaagctcttcatccagctcgttcagacctacaaccagcttttcgaggagaacccaatcaacgccagtggagttgacgccaaggctatcctctctgctcgtctgtcaaagtccaggaggcttgagaacttgattgcccagctgcctggcgaaaagaagaacggactgttcggaaacttgatcgctctctccctgggattgactcccaacttcaagtccaacttcgacctcgccgaggacgctaagttgcagttgtctaaagacacctacgacgatgacctcgacaacttgctggcccagataggcgaccaatacgccgatctcttcctcgccgctaagaacttgtccgacgcaatcctgctgtccgacatcctgagagtcaacactgagattaccaaagctcctctgtctgcttccatgattaagcgctacgacgagcaccaccaagatctgaccctgctcaaggccctggtgagacagcagctgcccgagaagtacaaggagatctttttcgaccagtccaagaacggctacgccggatacattgacggaggcgcctcccaggaagagttctacaagttcatcaagcccatccttgagaagatggacggtaccgaggagctgttggtgaagttgaacagagaggacctgttgaggaagcagagaaccttcgacaacggaagcatccctcaccaaatccacctgggagagctccacgccatcttgaggaggcaggaggatttctatcccttcctgaaggacaaccgcgagaagattgagaagatcttgaccttcagaattccttactacgtcgggccactcgccagaggaaactctaggttcgcctggatgacccgcaaatctgaagagaccattactccctggaacttcgaggaagtcgtggacaagggcgcttccgctcagtctttcatcgagaggatgaccaacttcgataaaaatctgcccaacgagaaggtgctgcccaagcactccctgttgtacgagtatttcacagtgtacaacgagctcaccaaggtgaagtacgtcacagagggaatgaggaagcctgccttcttgtccggagagcagaagaaggccatcgtcgacctgctcttcaagaccaacaggaaggtgactgtcaagcagctgaaggaggactacttcaagaagatcgagtgcttcgactccgtcgagatctctggtgtcgaggacaggttcaacgcctcccttgggacttaccacgatctgctcaagattattaaagacaaggacttcctggacaacgaggagaacgaggacatccttgaggacatcgtgctcaccctgaccttgttcgaagacagggaaatgatcgaagagaggctcaagacctacgcccacctcttcgacgacaaggtgatgaaacagctgaagagacgcagatataccggctggggaaggctctcccgcaaattgatcaacgggatcagggacaagcagtcagggaagactatactcgacttcctgaagtccgacggattcgccaacaggaacttcatgcagctcattcacgacgactccttgaccttcaaggaggacatccagaaggctcaggtgtctggacagggtgactccttgcatgagcacattgctaacttggccggctctcccgctattaagaagggcattttgcagaccgtgaaggtcgttgacgagctcgtgaaggtgatgggacgccacaagccagagaacatcgttattgagatggctcgcgagaaccaaactacccagaaagggcagaagaattcccgcgagaggatgaagcgcattgaggagggcataaaagagcttggctctcagatcctcaaggagcaccccgtcgagaacactcagctgcagaacgagaagctgtacctgtactacctccaaaacggaagggacatgtacgtggaccaggagctggacatcaacaggttgtccgactacgacgtcgaccacatcgtgcctcagtccttcctgaaggatgactccatcgacaataaagtgctgacacgctccgataaaaatagaggcaagtccgacaacgtcccctccgaggaggtcgtgaagaagatgaaaaactactggagacagctcttgaacgccaagctcatcacccagcgtaagttcgacaacctgactaaggctgagagaggaggattgtccgagctcgataaggccggattcatcaagagacagctcgtcgaaacccgccaaattaccaagcacgtggcccaaattctggattcccgcatgaacaccaagtacgatgaaaatgacaagctgatccgcgaggtcaaggtgatcaccttgaagtccaagctggtctccgacttccgcaaggacttccagttctacaaggtgagggagatcaacaactaccaccacgcacacgacgcctacctcaacgctgtcgttggaaccgccctcatcaaaaaatatcctaagctggagtctgagttcgtctacggcgactacaaggtgtacgacgtgaggaagatgatcgctaagtctgagcaggagatcggcaaggccaccgccaagtacttcttctactccaacatcatgaacttcttcaagaccgagatcactctcgccaacggtgagatcaggaagcgcccactgatcgagaccaacggtgagactggagagatcgtgtgggacaaagggagggatttcgctactgtgaggaaggtgctctccatgcctcaggtgaacatcgtcaagaagaccgaagttcagaccggaggattctccaaggagtccatcctccccaagagaaactccgacaagctgatcgctagaaagaaagactgggaccctaagaagtacggaggcttcgattctcctaccgtggcctactctgtgctggtcgtggccaaggtggagaagggcaagtccaagaagctgaaatccgtcaaggagctcctcgggattaccatcatggagaggagttccttcgagaagaaccctatcgacttcctggaggccaagggatataaagaggtgaagaaggacctcatcatcaagctgcccaagtactccctcttcgagttggagaacggaaggaagaggatgctggcttctgccggagagttgcagaagggaaatgagctcgcccttccctccaagtacgtgaacttcctgtacctcgcctctcactatgaaaagttgaagggctctcctgaggacaacgagcagaagcagctcttcgtggagcagcacaagcactacctggacgaaattatcgagcagatctctgagttctccaagcgcgtgatattggccgacgccaacctcgacaaggtgctgtccgcctacaacaagcacagggataagcccattcgcgagcaggctgaaaacattatccacctgtttaccctcacaaacttgggagcccctgctgccttcaagtacttcgacaccaccattgacaggaagagatacacctccaccaaggaggtgctcgacgcaacactcatccaccaatccatcaccggcctctatgaaacaaggattgacttgtcccagctgggaggcgactctagagccgatcccaagaagaagagaaaggtgaagagaccacgggaccgccacgatggcgagctgggaggccgcaagcgggcaaggtaggttaacctagacttgtccatcttctggattggccaacttaattaatgtatgaaataaaaggatgcacacatagtgacatgctaatcactataatgtgggcatcaaagttgtgtgttatgtgtaattactagttatctgaataaaagagaaagagatcatccatatttcttatcctaaatgaatgtcacgtgtctttataattctttgatgaaccagatgcatttcattaaccaaatccatatacatataaatattaatcatatataattaatatcaattgggttagcaaaacaaatctagtctaggtgtgttttgcgaattcgatatcaagcttatcgataccgtcgagggggggcccggtaccggcgcgccgttctatagtgtcacctaaatcgtatgtgtatgatacataaggttatgtattaattgtagccgcgttctaacgacaatatgtccatatggtgcactctcagtacaatctgctctgatgccgcatagttaagccagccccgacacccgccaacacccgctgacgcgccctgacgggcttgtctgctcccggcatccgcttacagacaagctgtgaccgtctccgggagctgcatgtgtcagaggttttcaccgtcatcaccgaaacgcgcgagacgaaagggcctcgtgatacgcctatttttataggttaatgtcatgaccaaaatcccttaacgtgagttttcgttccactgagcgtcagaccccgtagaaaagatcaaaggatcttcttgagatcctttttttctgcgcgtaatctgctgcttgcaaacaaaaaaaccaccgctaccagcggtggtttgtttgccggatcaagagctaccaactctttttccgaaggtaactggcttcagcagagcgcagataccaaatactgttcttctagtgtagccgtagttaggccaccacttcaagaactctgtagcaccgcctacatacctcgctctgctaatcctgttaccagtggctgctgccagtggcgataagtcgtgtcttaccgggttggactcaagacgatagttaccggataaggcgcagcggtcgggctgaacggggggttcgtgcacacagcccagcttggagcgaacgacctacaccgaactgagatacctacagcgtgagctatgagaaagcgccacgcttcccgaagggagaaaggcggacaggtatccggtaagcggcagggtcggaacaggagagcgcacgagggagcttccagggggaaacgcctggtatctttatagtcctgtcgggtttcgccacctctgacttgagcgtcgatttttgtgatgctcgtcaggggggcggagcctatggaaaaacgccagcaacgcggcctttttacggttcctggccttttgctggccttttgctcacatgttctttcctgcgttatcccctgattctgtggataaccgtattaccgcctttgagtgagctgataccgctcgccgcagccgaacgaccgagcgcagcgagtcagtgagcgaggaagcggaagagcgcccaatacgcaaaccgcctctccccgcgcgttggccgattcattaatgcaggttgatcagatctcgatcccgcgaaattaatacgactcactatagggagaccacaacggtttccctctagaaataattttgtttaactttaagaaggagatatacccatggaaaagcctgaactcaccgcgacgtctgtcgagaagtttctgatcgaaaagttcgacagcgtctccgacctgatgcagctctcggagggcgaagaatctcgtgctttcagcttcgatgtaggagggcgtggatatgtcctgcgggtaaatagctgcgccgatggtttctacaaagatcgttatgtttatcggcactttgcatcggccgcgctcccgattccggaagtgcttgacattggggaattcagcgagagcctgacctattgcatctcccgccgtgcacagggtgtcacgttgcaagacctgcctgaaaccgaactgcccgctgttctgcagccggtcgcggaggctatggatgcgatcgctgcggccgatcttagccagacgagcgggttcggcccattcggaccgcaaggaatcggtcaatacactacatggcgtgatttcatatgcgcgattgctgatccccatgtgtatcactggcaaactgtgatggacgacaccgtcagtgcgtccgtcgcgcaggctctcgatgagctgatgctttgggccgaggactgccccgaagtccggcacctcgtgcacgcggatttcggctccaacaatgtcctgacggacaatggccgcataacagcggtcattgactggagcgaggcgatgttcggggattcccaatacgaggtcgccaacatcttcttctggaggccgtggttggcttgtatggagcagcagacgcgctacttcgagcggaggcatccggagcttgcaggatcgccgcggctccgggcgtatatgctccgcattggtcttgaccaactctatcagagcttggttgacggcaatttcgatgatgcagcttgggcgcagggtcgatgcgacgcaatcgtccgatccggagccgggactgtcgggcgtacacaaatcgcccgcagaagcgcggccgtctggaccgatggctgtgtagaagtactcgccgatagtggaaaccgacgccccagcactcgtccgagggcaaaggaatagtgaggtacagcttggatcgatccggctgctaacaaagcccgaaaggaagctgagttggctgctgccaccgctgagcaataactagcataaccccttggggcctctaaacgggtcttgaggggttttttgctgaaaggaggaactatatccggatgctcgggcgcgccggtac

SEQ ID NO: 507 - DNA, 6113 bp, Artificial sequence
  RTW1192A
caagtagttctagtcttaatacaaatgtcaaatggcacaagtgagattttgaatttctgatgttgtaaaaatctcaggacatgaatactattgggaagcaattattcatacttcaccaatccaaactgacccaaaattctcaaatcacatgaaagcaaaaatgcatataacacgaagaataagaagaagaggaactaacctggggtttcgatgattaaagcgttgttgttgatgatgaaaacgatgattatggagagaaattgttgttgaatggtgaaattgttatagaaagagaacgaagatagagaaaaagatatatagatttttcaaggctcaaaccctaaaatcaccatgagagagaacaaagattgagaaacctacaaccactatgagagagaatgagcagaacagaagcgtgagatagagaacgagagttaaggtgcgagaggacacgaagaacaaaaggtgtgagagaaagaacaaaggagcctacggtgtgagatgagagaatttgaaattcttaccatttaggtggaatttcaattctacaattttattctattaaaattattttaaaaaatgatgtcattttaaattctttaaaatctcatatccaacaactgaattatgatagaggtatttcaaattcacttaaaaaaattatcttatttaaataccccatccaaacatagcgaaatgttcatgagaaggatcaagtggtttggaaacatagtactaatggtgtttatacagttcatggaatccttgatagataatttaaaggttgctggaaattggatgaaggtgtggagattaaatattcttccaaaaataaagcgttttatttggagagtgttgtgtggttgtctcccctgtaggcaaaagcttcgatgtaaaggagttcaatgtccaataacctatgctttctatccctcgattattgaaaatgaatgacacattttatttggttgaaatcaagaaataagcatgtggcaagcaacgggtatttgacaattcatagaacaaaaggtgaatgcagcaaaagaattaatgaactccttttcgatctacttggatcactacatggagatattatcaacaaatttgatgttactttatggagcagttggaattcttggaatgacaagatatgaaatgaacataccaaccctcctcttgtttctgtttcggtttctatgcagtattttgttgaatggcaaagtgcaaggtaatatgctcctcaacatcaattaacaaatgttcatgacatctcttaccagctccaacttggggacgtttgacaaacaccaccgtcaagtttccttaaatgcaacattaatgttgctcatttcaaggaggagaatagttttggtgtcggcatgatactccatcaaggaagattcgtcaaagctcactcacgttttcgacatgggtcgacatgggttacctgacccaaaggctgaggcttaggcttgggtttgcttcaagtattgatctgggcccagactattggtttacataatatcatttttgaaaacctaacatctaaaactcaaggttgtttagaggtgcgccattccaaaataagattatcctatttgtgcatgaatgcgaccaactatctcctgtttcagcattataaagtataaacaacaaacttctttaatcaagggactaaaagatattggacatacaagctaaaagtgatagaatttgagaaaacaaatattgacaacaatattcaagaggacactaaaacataattctcaaattttttttgtttatttaaaataaagtggttcattaggtagctccgggtgattgcggttacatcatgtacggaaaaataattctaatccttgatttaaatttgaacttgactatttatttattctttatttcattttgtaaatcattttatgtatctcctggcaagcaattttatccaccttgcaccaacaccttcgggttccataatcaaaccaccttaacttcacaccatgctgtaactcacaccgcccagcatctccaatgtgaaagaagctaaaatttaataaacaatcatacgaagcagtgacaaaataccagatggtattaatgcttcgataaaattaattggaaagtataaaatggtagaaaataataaattataattaatttaagtaagataaaaaataattaaaaactaaaatgttaaaattttaaaaaaattattttaaataatatttaaaaacattaaaaatcattttaaaaaatttatttatagaacaattaaataaatatttcagctaataaaaaacaaaagcttacctagccttagaagacaacttgtccaacaattagatgatacccattgcccttacgttttctttaacatcaattattgtttttgtcaacaagctatcttttagttttattttattggtaaaaaatatgtcgccttcaagttgcatcatttaacacatctcgtcattagaaaaataaaactcttccctaaacgattagtagaaaaaatcattcgataataaataagaaagaaaaattagaaaaaaataacttcattttaaaaaaatcattaaggctatattttttaaatgactaattttatatagactgtaactaaaagtatacaatttattatgctatgtatcttaaagaattacttataaaaatctacggaagaatatcttacaaagtgaaaaacaaatgagaaagaatttagtgggatgattatgattttatttgaaaattgaaaaaataattattaaagactttagtggagtaagaaagctttcctattagtcttttcttatccataaaaaaaaaaaaaaaaatctagcgtgacagcttttccatagattttaataatgtaaaatactggtagcagccgaccgttcaggtaatggacactgtggtcctaacttgcaacgggtgcgggcccaatttaataacgccgtggtaacggataaagccaagcgtgaagcggtgaaggtacatctctgactccgtcaagattacgaaaccgtcaactacgaaggactccccgaaatatcatctgtgtcataaacaccaagtcacaccatacatgggcacgcgtcacaatatgattggagaacggttccaccgcatatgctataaaatgcccccacacccctcgaccctaatcgcacttcaattgcaatcaaattagttcattctctttgcgcagttccctacctctcctttcaaggttcgtagatttcttccgtttttttttcttcttctttattgtttgttctacatcagcatgatgttgatttgattgtgttttctatcgtttcatcgattataaattttcataatcagaagattcagcttttattaatgcaagaacgtccttaattgatgattttataaccgtaaattaggtctaattagagtttttttcataaagattttcagatccgtttacaacaagccttaattgttgattctgtagtcgtagattaaggtttttttcatgaactacttcagatccgttaaacaacagccttatttgttgatacttcagtcgtttttcaagaaattgttcagatccgttgataaaagccttattcgttgattctgtatggtatttcaagagatattgctcaggtcctttagcaactaccttatttgttgattctgtggccatagattaggattttttttcacgaaattgcttcttgaaattacgtgatggattttgattctgatttatcttgtgattgttgactctacagatggcccaagtgagcagagtgcacaatcttgctcaaagcactcaaatttttggccattcttccaactccaacaaactcaaatcggtgaattcggtttcattgaggccacgcctttggggggcctcaaaatctcgcatcccgatgcataaaaatggaagctttatgggaaattttaatgtggggaagggaaattccggcgtgtttaaggtttctgcatcggtcgccgccgcagagaagccgtcaacgtcgccggagatcgtgttggaacccatcaaagacttctcgggtaccatcacattgccagggtccaagtctctgtccaatcgaattttgcttcttgctgctctctctgaggtgaagtttatttatttatttatttgtttgtttgttgttgggtgtgggaataggagtttgatgtgtagagtggattttgaatatttgatttttttttgtattattctgtgaaaatgaagcatcatgtcccatgaaagaaatggacacgaaattaagtggcttatgatgtgaaatgaggatagaaatgtgtgtagggttttttaatgggtagcaataagcatattcaatatctggattgatttggacgtttctgtataaaggagtatgctagcaatgtgttaatgtatggcttgctaaaatactcctaaaaatcaagtgggagtagtatacatatctacagcaaatgtattaggtgaggcatttggcttctctattgtaaggaacaaataatatcagttaatgtgaaaatcaatggttgatattccaatacattcatgatgtgttatttatatgtacctaatattgactgttgtttttctccgcaatgaccaagattatttattttatcctctaaagtgactaattgagttgcttactttagagaagttggacccattaggtgagagcgtggggggaactaatcttgaatatacaatctgagtcttgattatccaagtatggttgtatgaacaatgttagctctagaagataaaccctcccccaaaacacaaattagaatgacatttcaagttccatgtatgtcactttcattctattatttttacaacttttagttacttaacagatgtcttgttcagcataaattataatttattctgtttttttttagggaacaactgttgtagacaacttgttgtatagtgaggatattcattacatgcttggtgcattaaggacccttggactgcgtgtggaagatgacaaaacaaccaaacaagcaattgttgaaggctgtgggggattgtttcccactagtaaggaatctaaagatgaaatcaatttattccttggaaatgctggtattgcaatgagatctttgacagcagctgttgttgctgcaggtggaaatgcaaggtctgttttttttttttttgttcagcataatctttgaattgttcctcgtataactaatcacaacagagtacgtgttcttcttcctgttataatctaaaaatctcatccagattagtcatcctttcttcttaaaaggaacctttaattatcaatgtatttatttaatatttaaattagcttgtcaaagtctagcatatacatattttgattatattctgagaaatgcacctgagggtgttcctcatgatctacttcaacctctgttattattagattttctatcatgattactggtttgagtctctaagtagaccatcttgatgttcaaaatatttcagctacgtacttgatggggtgccccgaatgagagagaggccaattggggatttggttgctggtcttaagcaacttggtgcagatgttgattgctttcttggcacaaactgtccacctgttcgtgtaaatgggaagggaggacttcctggcggaaaggtatggtttggatttcatttagaataaggtggagtaactttcctggatcaaaattctaatttaagaagcctccctgttttcctctctttagaataagactaagggtaggtttaggagttgggttttggagagaaatggaagggagagcaatttttttcttcttctaataaatattctttaatttgatacattttttaagtaaaagaatataaagatagattagcataacttaatgttttaatcttttatttatttttataaatattatatacctgtctatttaaaaatcaaatatttgtcctccattccctttcccttcaaaacctcagttccaaatataccgtagttgaattatattttggaaggcctattggttggagacttttccttttcagagattatccctcacctttattatagcctttctatttttaaacttcatatagacgccattcttggggcggccgcgat

SEQ ID NO: 508 - DNA, 32 bp, Artificial sequence
  primer, soy1-F4
tcaataatactactctcttagacaccaaacaa

SEQ ID NO: 509 - DNA, 23 bp, Artificial sequence
  primer, soy1-R4
caaggaaaatgaatgatggcttt

SEQ ID NO: 510 - DNA, 18 bp, Artificial sequence
  probe, soy1-T3(FAM-MGB)
ccttcccaaactataatc

SEQ ID NO: 511 - DNA, 27 bp, Artificial sequence
  WOL1005, Forward_primer
aaatgttatcagaggaacatgagctgc

SEQ ID NO: 512 - DNA, 28 bp, Artificial sequence
  WOL1006, Reverse_primer
attatttttccgtacatgatgtaaccgc

SEQ ID NO: 513 - DNA, 438 bp, Cauliflower mozaic virus
cccatggagtcaaagattcaaatagaggacctaacagaactcgccgtaaagactggcgaacagttcatacagagtctcttacgactcaatgacaagaagaaaatcttcgtcaacatggtggagcacgacacgcttgtctactccaaaaatatcaaagatacagtctcagaagaccaaagggcaattgagacttttcaacaaagggtaatatccggaaacctcctcggattccattgcccagctatctgtcactttattgtgaagatagtggaaaaggaaggtggctcctacaaatgccatcattgcgataaaggaaaggccatcgttgaagatgcctctgccgacagtggtcccaaagatggacccccacccacgaggagcatcgtggaaaaagaagacgttccaaccacgtcttcaaagcaagtggattgatgtgat

SEQ ID NO: 514 - DNA, 19 bp, Cauliflower mozaic virus
gtctcagaagaccaaaggg

SEQ ID NO: 515 - DNA, 25 bp, Cauliflower mozaic virus
tgccatcattgcgataaaggaaagg

SEQ ID NO: 516 - DNA, 20 bp, Cauliflower mozaic virus
gatgcctctgccgacagtgg

SEQ ID NO: 517 - DNA, 3708 bp, Zea mays
ctgcagcccatcaaggagatctccggcaccgtcaagctgccggggtccaagtcgctttccaacaggatcctcctgctcgccgccctgtccgaggtgagcgattttggtgcttgctgcgctgccctgtctcactgctacctaaatgttttgcctgtcgaataccatggattctcggtgtaatccatctcacgatcagatgcaccgcatgtcgcatgcctagctctctctaatttgtctagtagtttgtatacggattaagattgataaatcggtaccgcaaaagctaggtgtaaataaacactacaaaattggatgttcccctatcggcctgtactcggctactcgttcttgtgatggcatgttatttcttcttggtgtttggtgaactcccttatgaaatttgggcgcaaagaaatcgccctcaagggttgatcttatgccatcgtcatgataaacagtgaagcacggatgatcctttacgttgtttttaacaaactttgtcagaaaactagcaatgttaacttcttaatgatgatttcacaacaaaaaaggtaaccttgctactaacataacaaaagacttgttgcttattaattatatgtttttttaatctttgatcaggggacaacagtggttgataacctgttgaacagtgaggatgtccactacatgctcggggccttgaggactcttggtctctctgtcgaagcggacaaagctgccaaaagagctgtagttgttggctgtggtggaaagttcccagttgaggatgctagagaggaagtgcagctcttcttggggaatgctggaatcgcaatgcggtcattgacagcagctgttactgctgctggtggaaatgcaacgtatgtttcctctctctctctacaatacttgttggagttagtatgaaacccatgtgtatgtctagtggcttatggtgtattggtttttgaacttcagttacgtgcttgatggagtaccaagaatgagggagagacccattggcgacttggttgtcggattgaagcagcttggtgcagatgttgattgtttccttggcactgactgcccacctgttcgtgtcaatggaatcggagggctacctggtggcaaggttagttactaagggccacatgttacattcttctgtaaatggtacaactattgtcgagcttttgcatttgtaaggaaaacattgattgatctgaatttgatgctacaccacaaaatatctacaaatggtcatccctaactagcaaaccatgtctccattaagctcaatgaagtaatacttggcatgtgtttatcaacttaatttccatcttctggggtattgcctgttttctagtctaatagcatttgtttttagaattagctcttacaactgttatgttctacaggtcaagctgtctggctccatcagcagtcagtacttgagtgccttgctgatggctgctcctttggctcttggggatgtggagattgaaatcattgataaattaatctccattccctacgtcgaaatgacattgagattgatggagcgttttggtgtgaaagcagagcattctgatagctgggacagattctacattaagggaggtcaaaaatacaagtaagctctgtaatgtatttcactactttgatgccaatgtttcagttttcagttttccaaacagtcgcatcaatatttgaatagatgcactgtagaaaaaaatcattgcagggaaaaactagtactgagtattttgactgtaaattatttaaccagtcggaatatagtcagtctattggagtcaagagcgtgaaccgaaatagccagttaattatcccattatacagaggacaaccatgtatactattgaaacttggtttaagagaatctaggtagctggactcgtagctgcttggcatggataccttcttatctttaggaaaagacacttgattttttttctgtggccctctatgatgtgtgaacctgcttctctattgctttagaaggatatatctatgtcgttatgcaacatgcttcccttagtcatttgtactgaaatcagtttcataagttcgttagtggttccctaaacgaaaccttgtttttctttgcaatcaacaggtcccctaaaaatgcctatgttgaaggtgatgcctcaagcgcaagctatttcttggctggtgctgcaattactggagggactgtgactgtggaaggttgtggcaccaccagtttgcaggtaaagatttcttggctggtgctacgataactgcttttgtctttttggtttcagcattgttctcagagtcactaaataacattatcatctgcaaacgtcaaatagacatacttaggtgaatggatattcatgtaaccgtttccttacaaatttgctgaaacctcagggtgatgtgaagtttgctgaggtactggagatgatgggagcgaaggttacatggaccgagactagcgtaactgttactggcccaccgcgggagccatttgggaggaaacacctcaaggcgattgatgtcaacatgaacaagatgcctgatgtcgccatgactcttgctgtggttgccctctttgccgatggcccgacagccatcagagacggtaaaacattctcagccctacaaccatgcctcttctacatcactacttgacaagactaaaaactattggctcgttggcagtggcttcctggagagtaaaggagaccgagaggatggttgcgatccggacggagctaaccaaggtaaggctacatacttcacatgtctcacgtcgtctttccatagctcgctgcctcttagcggcttgcctgcggtcgctccatcctcggttgctgtctgtgttttccacagctgggagcatctgttgaggaagggccggactactgcatcatcacgccgccggagaagctgaacgtgacggcgatcgacacgtacgacgaccacaggatggccatggccttctcccttgccgcctgtgccgaggtccccgtgaccatccgggaccctgggtgcacccggaagaccttccccgactacttcgatgtgctgagcactttcgtcaagaattaataaagcgtgcgatactaccacgcagcttgattgaagtgataggcttgtgctgaggaaatacatttcttttgttctgttttttctctttcacgggattaagttttgagtctgtaacgttagttgtttgtagcaagtttctatttcggatcttaagtttgtgcactgtaagccaaatttcatttcaagagtggttcgttggaataataagaataataaattacgtttcagtggctgtcaagcctgctgctacgttttaggagatggcattagacattcatcatcaacaacaataaaaccttttagcctcaaacaataatagtgaagttattttttagtcctaaacaagttgcattaggatatagttaaaacacaaaagaagctaaagttagggtttagacatgtggatattgttttccatgtatagtatgttctttctttgagtctcatttaactacctctacacataccaactttagttttttttctacctcttcatgttactatggtgccttcttatcccactgagcattggtatatttagaggtttttgttgaacatgcctaaatcatctcaatcaacgatggacaatcttttcttcgattgagctgaggtacgtcatctaga

SEQ ID NO: 518 - DNA, 3714 bp, Zea mays
ctgcagcccatcaaggagatctccggcaccgtcaagctgccggggtccaagtcgctttccaacaggatcctcctgctcgccgccctgtccgaggtgagcgattttggtgcttgctgcgctgccctgtctcactgctacctaaatgttttgcctgtcgaataccatggattctcggtgtaatccatatctgcacgatcagatatgcaccgcatgtcgcatatctgagctctctctaatttgtctagtagtttgtatacggattaagattgataaatcggtaccgcaaaagctaggtgtaaataaacactacaaaattggatgttcccctatcggcctgtactcggctactcgttcttgtgatggcatgttatttcttcttggtgtttggtgaactcccttatgaaatttgggcgcaaagaaatcgccctcaagggttgatcttatgccatcgtcatgataaacagtgaagcacggatgatcctttacgttgtttttaacaaactttgtcagaaaactagcaatgttaacttcttaatgatgatttcacaacaaaaaaggtaaccttgctactaacataacaaaagacttgttgcttattaattatatgtttttttaatctttgatcaggggacaacagtggttgataacctgttgaacagtgaggatgtccactacatgctcggggccttgaggactcttggtctctctgtcgaagcggacaaagctgccaaaagagctgtagttgttggctgtggtggaaagttcccagttgaggatgctaaagaggaagtgcagctcttcttggggaatgctggaatcgcaatgcggtcattgacagcagctgttactgctgctggtggaaatgcaacgtatgtttcctctctctctctacaatacttgttggagttagtatgaaacccatgtgtatgtctagtggcttatggtgtattggtttttgaacttcagttacgtgcttgatggagtaccaagaatgagggagagacccattggcgacttggttgtcggattgaagcagcttggtgcagatgttgattgtttccttggcactgactgcccacctgttcgtgtcaatggaatcggagggctacctggtggcaaggttagttactaagggccacatgttacattcttctgtaaatggtacaactattgtcgagcttttgcatttgtaaggaaaacattgattgatctgaatttgatgctacaccacaaaatatctacaaatggtcatccctaactagcaaaccatgtctccattaagctcaatgaagtaatacttggcatgtgtttatcaacttaatttccatcttctggggtattgcctgttttctagtctaatagcatttgtttttagaattagctcttacaactgttatgttctacaggtcaagctgtctggctccatcagcagtcagtacttgagtgccttgctgatggctgctcctttggctcttggggatgtggagattgaaatcattgataaattaatctccattccctacgtcgaaatgacattgagattgatggagcgttttggtgtgaaagcagagcattctgatagctgggacagattctacattaagggaggtcaaaaatacaagtaagctctgtaatgtatttcactactttgatgccaatgtttcagttttcagttttccaaacagtcgcatcaatatttgaatagatgcactgtagaaaaaaatcattgcagggaaaaactagtactgagtattttgactgtaaattatttaaccagtcggaatatagtcagtctattggagtcaagagcgtgaaccgaaatagccagttaattatcccattatacagaggacaaccatgtatactattgaaacttggtttaagagaatctaggtagctggactcgtagctgcttggcatggataccttcttatctttaggaaaagacacttgattttttttctgtggccctctatgatgtgtgaacctgcttctctattgctttagaaggatatatctatgtcgttatgcaacatgcttcccttagtcatttgtactgaaatcagtttcataagttcgttagtggttccctaaacgaaaccttgtttttctttgcaatcaacaggtcccctaaaaatgcctatgttgaaggtgatgcctcaagcgcaagctatttcttggctggtgctgcaattactggagggactgtgactgtggaaggttgtggcaccaccagtttgcaggtaaagatttcttggctggtgctacgataactgcttttgtctttttggtttcagcattgttctcagagtcactaaataacattatcatctgcaaacgtcaaatagacatacttaggtgaatggatattcatgtaaccgtttccttacaaatttgctgaaacctcagggtgatgtgaagtttgctgaggtactggagatgatgggagcgaaggttacatggaccgagactagcgtaactgttactggcccaccgcgggagccatttgggaggaaacacctcaaggcgattgatgtcaacatgaacaagatgcctgatgtcgccatgactcttgctgtggttgccctctttgccgatggcccgacagccatcagagacggtaaaacattctcagccctacaaccatgcctcttctacatcactacttgacaagactaaaaactattggctcgttggcagtggcttcctggagagtaaaggagaccgagaggatggttgcgatccggacggagctaaccaaggtaaggctacatacttcacatgtctcacgtcgtctttccatagctcgctgcctcttagcggcttgcctgcggtcgctccatcctcggttgctgtctgtgttttccacagctgggagcatctgttgaggaagggccggactactgcatcatcacgccgccggagaagctgaacgtgacggcgatcgacacgtacgacgaccacaggatggccatggccttctcccttgccgcctgtgccgaggtccccgtgaccatccgggaccctgggtgcacccggaagaccttccccgactacttcgatgtgctgagcactttcgtcaagaattaataaagcgtgcgatactaccacgcagcttgattgaagtgataggcttgtgctgaggaaatacatttcttttgttctgttttttctctttcacgggattaagttttgagtctgtaacgttagttgtttgtagcaagtttctatttcggatcttaagtttgtgcactgtaagccaaatttcatttcaagagtggttcgttggaataataagaataataaattacgtttcagtggctgtcaagcctgctgctacgttttaggagatggcattagacattcatcatcaacaacaataaaaccttttagcctcaaacaataatagtgaagttattttttagtcctaaacaagttgcattaggatatagttaaaacacaaaagaagctaaagttagggtttagacatgtggatattgttttccatgtatagtatgttctttctttgagtctcatttaactacctctacacataccaactttagttttttttctacctcttcatgttactatggtgccttcttatcccactgagcattggtatatttagaggtttttgttgaacatgcctaaatcatctcaatcaacgatggacaatcttttcttcgattgagctgaggtacgtcatctaga

SEQ ID NO: 519 - DNA, 3708 bp, Zea mays
ctgcagcccatcaaggagatctccggcaccgtcaagctgccggggtccaagtcgctttccaacaggatcctcctgctcgccgccctgtccgaggtgagcgattttggtgcttgctgcgctgccctgtctcactgctacctaaatgttttgcctgtcgaataccatggattctcggtgtaatccatctcacgatcagatgcaccgcatgtcgcatgcctagctctctctaatttgtctagtagtttgtatacggattaagattgataaatcggtaccgcaaaagctaggtgtaaataaacactacaaaattggatgttcccctatcggcctgtactcggctactcgttcttgtgatggcatgttatttcttcttggtgtttggtgaactcccttatgaaatttgggcgcaaagaaatcgccctcaagggttgatcttatgccatcgtcatgataaacagtgaagcacggatgatcctttacgttgtttttaacaaactttgtcagaaaactagcaatgttaacttcttaatgatgatttcacaacaaaaaaggtaaccttgctactaacataacaaaagacttgttgcttattaattatatgtttttttaatctttgatcaggggacaacagtggttgataacctgttgaacagtgaggatgtccactacatgctcggggccttgaggactcttggtctctctgtcgaagcggacaaagctgccaaaagagctgtagttgttggctgtggtggaaagttcccagttgaggatgctagaaaggaagtgcagctcttcttggggaatgctggaatcgcaatgcggtcattgacagcagctgttactgctgctggtggaaatgcaacgtatgtttcctctctctctctacaatacttgttggagttagtatgaaacccatgtgtatgtctagtggcttatggtgtattggtttttgaacttcaggtacgtgcttgatggagtaccaagaatgagggagagacccattggcgacttggttgtcggattgaagcagcttggtgcagatgttgattgtttccttggcactgactgcccacctgttcgtgtcaatggaatcggagggctacctggtggcaaggttagttactaagggccacatgttacattcttctgtaaatggtacaactattgtcgagcttttgcatttgtaaggaaaacattgattgatctgaatttgatgctacaccacaaaatatctacaaatggtcatccctaactagcaaaccatgtctccattaagctcaatgaagtaatacttggcatgtgtttatcaacttaatttccatcttctggggtattgcctgttttctagtctaatagcatttgtttttagaattagctcttacaactgttatgttctacaggtcaagctgtctggctccatcagcagtcagtacttgagtgccttgctgatggctgctcctttggctcttggggatgtggagattgaaatcattgataaattaatctccattccctacgtcgaaatgacattgagattgatggagcgttttggtgtgaaagcagagcattctgatagctgggacagattctacattaagggaggtcaaaaatacaagtaagctctgtaatgtatttcactactttgatgccaatgtttcagttttcagttttccaaacagtcgcatcaatatttgaatagatgcactgtagaaaaaaatcattgcagggaaaaactagtactgagtattttgactgtaaattatttaaccagtcggaatatagtcagtctattggagtcaagagcgtgaaccgaaatagccagttaattatcccattatacagaggacaaccatgtatactattgaaacttggtttaagagaatctaggtagctggactcgtagctgcttggcatggataccttcttatctttaggaaaagacacttgattttttttctgtggccctctatgatgtgtgaacctgcttctctattgctttagaaggatatatctatgtcgttatgcaacatgcttcccttagtcatttgtactgaaatcagtttcataagttcgttagtggttccctaaacgaaaccttgtttttctttgcaatcaacaggtcccctaaaaatgcctatgttgaaggtgatgcctcaagcgcaagctatttcttggctggtgctgcaattactggagggactgtgactgtggaaggttgtggcaccaccagtttgcaggtaaagatttcttggctggtgctacgataactgcttttgtctttttggtttcagcattgttctcagagtcactaaataacattatcatctgcaaacgtcaaatagacatacttaggtgaatggatattcatgtaaccgtttccttacaaatttgctgaaacctcagggtgatgtgaagtttgctgaggtactggagatgatgggagcgaaggttacatggaccgagactagcgtaactgttactggcccaccgcgggagccatttgggaggaaacacctcaaggcgattgatgtcaacatgaacaagatgcctgatgtcgccatgactcttgctgtggttgccctctttgccgatggcccgacagccatcagagacggtaaaacattctcagccctacaaccatgcctcttctacatcactacttgacaagactaaaaactattggctcgttggcagtggcttcctggagagtaaaggagaccgagaggatggttgcgatccggacggagctaaccaaggtaaggctacatacttcacatgtctcacgtcgtctttccatagctcgctgcctcttagcggcttgcctgcggtcgctccatcctcggttgctgtctgtgttttccacagctgggagcatctgttgaggaagggccggactactgcatcatcacgccgccggagaagctgaacgtgacggcgatcgacacgtacgacgaccacaggatggccatggccttctcccttgccgcctgtgccgaggtccccgtgaccatccgggaccctgggtgcacccggaagaccttccccgactacttcgatgtgctgagcactttcgtcaagaattaataaagcgtgcgatactaccacgcagcttgattgaagtgataggcttgtgctgaggaaatacatttcttttgttctgttttttctctttcacgggattaagttttgagtctgtaacgttagttgtttgtagcaagtttctatttcggatcttaagtttgtgcactgtaagccaaatttcatttcaagagtggttcgttggaataataagaataataaattacgtttcagtggctgtcaagcctgctgctacgttttaggagatggcattagacattcatcatcaacaacaataaaaccttttagcctcaaacaataatagtgaagttattttttagtcctaaacaagttgcattaggatatagttaaaacacaaaagaagctaaagttagggtttagacatgtggatattgttttccatgtatagtatgttctttctttgagtctcatttaactacctctacacataccaactttagttttttttctacctcttcatgttactatggtgccttcttatcccactgagcattggtatatttagaggtttttgttgaacatgcctaaatcatctcaatcaacgatggacaatcttttcttcgattgagctgaggtacgtcatctaga

SEQ ID NO: 520 - protein, 464 aa, zea mays
MQLDLNVAEAPPPVEMEASDSGSSVLNASEAASAGGAPAPAEEGSSSTPAVLEFSILIRSDSDAAGADEDEDATPSPPPRHRHQHQQQLVTRELFPAGAGPPAPTPRHWAELGFFRADLQQQQAPGPRIVPHPHAAPPPAKKSRRGPRSRSSQYRGVTFYRRTGRWESHIWDCGKQVYLGGFDTAHAAARAYDRAAIKFRGVDADINFNLSDYEDDMKQMGSLSKEEFVHVLRRQSTGFSRGSSRYRGVTLHKCGRWEARMGQFLGKKYIYLGLFDSEVEAARAYDKAAIKCNGREAVTNFEPSTYHGELPTEVADVDLNLSISQPSPQRDKNSCLGLQLHHGPFEGSELKKTKIDDAPSELPGRPRQLSPLVAEHPPAWPAQPPHPFFVFTNHEMSASGDLHRRPAGAVPSWAWQVAAAAPPPAALPSSAAASSGFSNTATTAATTAPSASSLRYCPPPPPPS

SEQ ID NO: 521 - DNA, 1413 bp, Zea mays
atgcagttggatctgaacgtggccgaggcgccgccgccggtggagatggaggcgagcgactcggggtcgtcggtgctgaacgcgtcggaagcggcgtcggcgggcggcgcgcccgcgccggcggaggagggatctagctcaacgccggccgtgctggagttcagcatcctcatccggagcgatagcgacgcggccggcgcggacgaggacgaggacgccacgccatcgcctcctcctcgccaccgccaccagcaccagcagcagctcgtgacccgcgagctgttcccggccggcgccggtccgccggccccgacgccgcggcattgggccgagctcggcttcttccgcgccgacctgcagcagcaacaggcgccgggccccaggatcgtgccgcacccacacgccgcgccgccgccggccaagaagagccgccgcggcccgcgctcccgcagctcgcagtaccgcggcgtcaccttctaccgccgcacaggccgctgggagtcccacatctgggattgcggcaagcaggtgtacctaggtggattcgacaccgctcacgccgctgcaagggcgtacgaccgggcggcgatcaagttccgcggcgtcgacgccgacatcaacttcaacctcagcgactacgaggacgacatgaagcagatggggagcctgtccaaggaggagttcgtgcacgtcctgcgccgtcagagcaccggcttctcgagaggcagctccaggtacagaggcgtcaccctgcacaagtgcggccgctgggaggcgcgcatggggcagttcctcggcaagaagtacatataccttgggctattcgacagcgaagtagaggctgcaagagcctacgacaaggccgccatcaaatgcaatggcagagaggccgtgacgaacttcgagccgagcacgtatcacggggagctgccgactgaagttgctgatgtcgatctgaacctgagcatatctcagccgagcccccaaagagacaagaacagctgcctaggtctgcagctccaccacggaccattcgagggctccgaactgaagaaaaccaagatcgacgatgctccctctgagctaccgggccgccctcgtcagctgtctcctctcgtggctgagcatccgccggcctggcctgcgcagccgcctcaccccttcttcgtcttcacaaaccatgagatgagtgcatcaggagatctccacaggaggcctgcaggggctgttcccagctgggcatggcaggtggcagcagcagctcctcctcctgccgccctgccgtcgtccgctgcagcatcatcaggattctccaacaccgccacgacagctgccaccaccgccccatcggcctcctccctccggtactgcccgccgccgccgccgccgtcgagccatcaccatccccgctga

SEQ ID NO: 522 - protein, 514 aa, Zea Mays
MTTSTTAKQLRRVRTLGRGASGAVVWLASDEASGELVAVKSARAAGAAAQLQREGRVLRGLSSPHIVPCLGSRAAAGGEYQLLLEFAPGGSLADEAARSGGGRLAERAIGAYAGDVARGLAYLHGRSLVHGDVKARNVVIGGDGRARLTDFGCARPAGGSTRPVGGTPAFMAPEVARGQEQGPAADVWALGCMVVELATGRAPWSDVEGDDLLAALHRIGYTDDVPEVPAWLSPEAKDFLAGCFERRAAARPTAAQPAAHPFVVASASAAAAIRGPAKQEVVPSPKSTLHDAFWDSDAEDEADEMSTGAAAERIGALACAASALPDWDTEEGWIDLQDDHSAGTADAPPAPVADYFISWAEPSDAELEPFVAVAAAAGLPHVAGVALAGATAVNLQGSYYYYPPMHLGVRGNEIPRPLLDHHGDGLEKGQGSHRVCNRETEKVTMKRISLKRRAAFLLDQHHVRSLDKLEYRPRHDRMLRRRQSIYRSNSVLGYDVSKGRQVRWRRAVCIAVAA

SEQ ID NO: 523 - DNA, 1545 bp, Zea mays
atgacgacgtcgaccacggcgaagcagctccggcgcgtgcgcacgctcggccgcggcgcgtcgggcgccgtggtgtggctggcctccgacgaggcctcgggcgagctggtggcggtcaagtcggcgcgcgccgccggggccgcggcgcagctgcagcgcgagggccgcgtcctccggggcctctcgtcgccgcacatcgtgccctgcctcggctcccgcgccgcggcgggcggcgagtaccagctcctgctggagttcgcgccgggcgggtcgctggccgacgaggccgccaggagcggcgggggccgcctcgcggagcgcgccatcggcgcctacgccggggacgtggcgcgcgggctggcgtacctccacggccggtcgctcgtgcacggggacgtcaaggcccggaacgtggtcatcggcggcgacgggcgcgccaggctgaccgacttcgggtgcgcgaggccggccggcgggtcgacgcgccccgtcgggggcaccccggcgttcatggcgcccgaggtggcgcgcggccaggagcagggccccgccgccgacgtctgggcgctcgggtgcatggtcgtcgagctggccacgggccgcgcgccctggagcgacgtggagggcgacgacctcctcgccgcgctccaccggatcgggtacacggacgacgtgccggaggtgcccgcgtggctgtcgcccgaggccaaggacttcctggccggctgcttcgagcgccgcgccgccgcccggcccacggccgcgcagcccgcggcgcacccgttcgtcgtcgcctccgcctccgccgccgccgccatccgcggcccggcgaagcaggaggtggtcccgtcacccaagagcacgctgcacgacgcgttctgggactcggacgccgaggacgaagcggacgagatgtcgacgggcgcggcggccgagaggatcggggcattggcgtgcgccgcctccgcgctgcctgactgggacaccgaggaaggctggatcgacctccaggacgaccactcggccggaactgccgacgcaccgccggcgcccgtcgcggactacttcatcagctgggcggagccgtcagacgcagagctggaaccattcgtcgccgtcgccgccgccgcaggtctcccgcacgttgcaggagttgcattagcaggcgccaccgccgttaacctgcagggcagttattattattacccgcctatgcatctaggcgtccgcggaaacgagattccacgcccgttgttggatcatcatggcgacgggttagaaaaggggcagggatcccaccgcgtttgtaacagagaaacagaaaaggtaacaatgaaacgaatttcgttaaaaagaagagctgctttccttctcgaccagcatcacgtgcgatcgctggacaaactggaatatcgtccacgtcacgaccgaatgctgcgtcgacggcaatctatatatcggagcaatagcgtccttggttacgacgttagcaaaggtaggcaggtccgttggcgccgtgcggtttgcattgccgttgctgcctga

SEQ ID NO: 524 - DNA, 671 bp, zea mays
cggatccactagtaacggccgccagtgtgctggaattcgcccttgacggcccgggctggtatttcaaaactatagtattttaaaattgcattaacaaacatgtcctaattggtactcctgagatactataccctcctgttttaaaatagttggcattatcgaattatcattttactttttaatgttttctcttcttttaatatattttatgaattttaatgtattttaaaatgttatgcagttcgctctggacttttctgctgcgcctacacttgggtgtactgggcctaaattcagcctgaccgaccgcctgcattgaataatggatgagcaccggtaaaatccgcgtacccaactttcgagaagaaccgagacgtggcgggccgggccaccgacgcacggcaccagcgactgcacacgtcccgccggcgtacgtgtacgtgctgttccctcactggccgcccaatccactcatgcatgcccacgtacacccctgccgtggcgcgcccagatcctaatcctttcgccgttctgcacttctgctgcctataaatggcggcatcgaccgtcacctgcttcaccaccggcgagccacatcgagaacacgatcgagcacacaagcacgaagactcgtttaggagaaaccacaaaccaccaagccgtgcaagcac

SEQ ID NO: 525 - protein, 245 aa, zea mays
MGRGKVQLKRIENKINRQVTFSKRRSGLLKKAHEISVLCDAEVALIIFSTKGKLYEYSTDSCMDKILERYERYSYAEKVLISAEYETQGNWCHEYRKLKAKVETIQKCQKHLMGEDLETLNLKELQQLEQQLESSLKHIRTRKSQLMVESISALQRKEKSLQEENKVLQKELAEKQKDQRQQVQRDQTQQQTSSSSTSFMLREAAPTTNVSIFPVAAGGRVVEGAAAQPQARVGLPPWMLSHLSC

SEQ ID NO: 526 - DNA, 738 bp, zea mays
atggggcgcgggaaggtgcagctgaagcggatcgagaacaagatcaaccgccaggtgacattctccaagcgccgctcggggctactcaagaaggcgcacgagatctccgtgctctgcgacgccgaggtcgcgctcatcatcttctccaccaagggcaagctctacgagtactctaccgattcatgtatggacaaaattcttgaacggtatgagcgctactcctatgcagaaaaggttctcatttccgcagaatatgaaactcagggcaattggtgccatgaatatagaaaactaaaggcgaaggtcgagacaatacagaaatgtcaaaagcacctcatgggagaggatcttgaaactttgaatctcaaagagcttcagcaactagagcagcagctggagagttcactgaaacatatcagaacaaggaagagccagcttatggtcgagtcaatttcagcgctccaacggaaggagaagtcactgcaggaggagaacaaggttctgcagaaggagctcgcggagaagcagaaagaccagcggcagcaagtgcaacgggaccaaactcaacagcagaccagttcgtcttccacgtccttcatgttaagggaagctgccccaacaacaaatgtcagcatcttccctgtggcagcaggcgggagggtggtggaaggggcagcagcgcagccgcaggctcgcgttggactgccaccatggatgcttagccatctgagctgctga

SEQ ID NO: 527 - DNA, 80 bp, zea mays
  misc_feature (1)..(80): sequence of Figure 34B
gctaaagaggaagtgcagctcttcttggggaatgctggaactgcaatgcggccattgacagcagctgttactgctgctgg

SEQ ID NO: 528 - DNA, 80 bp, zea mays
  misc_feature (1)..(80): sequence of Figure 34c
gctagagaggaagtgcagctcttcttggggaatgctggaatcgcaatgcggtcattgacagcagctgttactgctgctgg

SEQ ID NO: 529 - DNA, 37 bp, zea mays
  misc_feature (1)..(37): sequence of Figure 35b
catctcacgatcagatgcaccgcatgtcgcatgccta

SEQ ID NO: 530 - DNA, 42 bp, zea mays
  misc_feature (1)..(42): sequence of Figure 35c
catatctgcacgatcagatatgcaccgcatgtcgcatatctg

SEQ ID NO: 531 - DNA, 31 bp, zea mays
  misc_feature (1)..(31): sequence of Figure 37
gtttttgaacttcagttacgtgcttgatgga

SEQ ID NO: 532 - DNA, 31 bp, zea mays
  misc_feature (1)..(31): sequence of Figure 37
gtttttgaacttcaggtacgtgcttgatgga

SEQ ID NO: 533 - DNA, 459 bp, Artificial Sequence
  Southern genomic probe
agctttatccatccatccatcgcgctagctggctgcaggcacgggttatcttatcttgtcgtccagaggacgacacacggccggccggtgaagtaaaagggagtaatcttattttgccaggacgaggggcggtacatgatattacacacgtaccatgcatgcatatatgcatggacaaggtacgtcgtcgtcgatcgacgtcgatgcatatgtgtgtatgtatgtacgtgcataatgcatggtaccagctgctggcttatatatatttgtcaccgatcgatgcatgctgctgctctacacggtttgacactttaatttgactcatcgatgaccttgctagatagtagcggctcgtcaattaatgagccatcaagttaacaagagggcacgggcttgcgcgactgattccaccttattaacatacgccctgcgcccgcgcgtgctgtacgtacgagaatt

SEQ ID NO: 534 - DNA, 446 bp, Artificial Sequence
  Southern MoPAT probe
tcgaagtcgcgctgccagaagccgacgtcgtgccagccgccgtgcttgtagccggcggcgcggagggtgccgcgggcggtgtagccgagggcctcgtggaggcgcacggacgggtcgttcgggaggccgatcacggccaccacggacttgaagccctgggcctccatgctcttgaggaggtgggtgtagagggtggagccgaggccgaggcgctggtggcggtgggacacgtacacggtggactccacggtccagtcgtaggcgttgcgggccttccacgggccggcgtaggcgatgccggccaccacgccctccacctcggccacgagccacgggtagcggtcctggaggcgctccaggtcgtcgatccactcctgcggggtctgcggctcggtgcggaagttcacggtggaggtctcgatgtagtggttcacgatgtcgcacac

SEQ ID NO: 535 - DNA, 20 bp, Artificial Sequence
  RF-FPCas-1
gcaggtctcacgacggttgg

SEQ ID NO: 536 - DNA, 23 bp, Artificial Sequence
  RF-FPCas-2
gtaaagtacgcgtacgtgtgagg

SEQ ID NO: 537 - DNA, 23 bp, Artificial Sequence
  ALSCas-4
gctgctcgattccgtccccatgg

SEQ ID NO: 538 - DNA, 804 bp, Artificial Sequence
  ALS modification repair template 804
agcttacagccgccgcaaccatggccaccgccgccgccgcgtctaccgcgctcactggcgccactaccgctgcgcccaaggcgaggcgccgggcgcacctcctggccacccgccgcgccctcgccgcgcccatcaggtgctcagcggcgtcacccgccatgccgatggctcccccggccaccccgctccggccgtggggccccaccgatccccgcaagggcgccgacatcctcgtcgagtccctcgagcgctgcggcgtccgcgacgtcttcgcctaccccggcggcgcgtccatggagatccaccaggcactcacccgctcccccgtcatcgccaaccacctcttccgccacgagcaaggggaggcctttgcggcctccggctacgcgcgctcctcgggccgcgtcggcgtctgcatcgccacctccggccccggcgccaccaaccttgtctccgcgctcgccgacgcgttgctcgactccgtccccattgtcgccatcacgggacaggtgtcgcgacgcatgattggcaccgacgccttccaggagacgcccatcgtcgaggtcacccgctccatcaccaagcacaactacctggtcctcgacgtcgacgacatcccccgcgtcgtgcaggaggctttcttcctcgcctcctctggtcgaccagggccggtgcttgtcgacatccccaaggacatccagcagcagatggcggtgcctgtctgggacaagcccatgagtctgcctgggtacattgcgcgccttcccaagccccctgcgactgagttgcttgagcagaagggcg

SEQ ID NO: 539 - DNA, 127 bp, Artificial Sequence
  ALS modification repair template 127
aaccttgtctccgcgctcgccgacgcgttgctcgactccgtccccattgtcgccatcacgggacaggtgtcgcgacgcatgattggcaccgacgccttccaggagacgcccatcgtcgaggtcaccc

SEQ ID NO: 540 - DNA, 25 bp, Artificial Sequence
  ALS Forward_primer;
ctacgcacatccccctttctcccac

SEQ ID NO: 541 - DNA, 36 bp, Artificial Sequence
  ALS Reverse_primer
atgcatacctagcatgcgcagagacagtgggtcgtc

SEQ ID NO: 542 - DNA, 22 bp, Artificial sequence
  soy ALS1-CR1, Cas9 target sequence
caccggccaggtcccccgccgg

SEQ ID NO: 543 - DNA, 22 bp, Artificial sequence
  soy ALS2-CR2, Cas9 target sequence
ggcgtcggtgccgatcatccgg

SEQ ID NO: 544 - DNA, 9093 bp, Artificial sequence
  QC880
ccgggtgtgatttagtataaagtgaagtaatggtcaaaagaaaaagtgtaaaacgaagtacctagtaataagtaatattgaacaaaataaatggtaaagtgtcagatatataaaataggctttaataaaaggaagaaaaaaaacaaacaaaaaataggttgcaatggggcagagcagagtcatcatgaagctagaaaggctaccgatagataaactatagttaattaaatacattaaaaaatacttggatctttctcttaccctgtttatattgagacctgaaacttgagagagatacactaatcttgccttgttgtttcattccctaacttacaggactcagcgcatgtcatgtggtctcgttccccatttaagtcccacaccgtctaaacttattaaattattaatgtttataactagatgcacaacaacaaagcttgcaccggccaggtcccccgcgttttagagctagaaatagcaagttaaaataaggctagtccgttatcaacttgaaaaagtggcaccgagtcggtgcttttttttgcggccgcaattggatcgggtttacttattttgtgggtatctatacttttattagatttttaatcaggctcctgatttctttttatttcgattgaattcctgaacttgtattattcagtagatcgaataaattataaaaagataaaatcataaaataatattttatcctatcaatcatattaaagcaatgaatatgtaaaattaatcttatctttattttaaaaaatcatataggtttagtatttttttaaaaataaagataggattagttttactattcactgcttattacttttaaaaaaatcataaaggtttagtatttttttaaaataaatataggaatagttttactattcactgctttaatagaaaaatagtttaaaatttaagatagttttaatcccagcatttgccacgtttgaacgtgagccgaaacgatgtcgttacattatcttaacctagctgaaacgatgtcgtcataatatcgccaaatgccaactggactacgtcgaacccacaaatcccacaaagcgcgtgaaatcaaatcgctcaaaccacaaaaaagaacaacgcgtttgttacacgctcaatcccacgcgagtagagcacagtaaccttcaaataagcgaatggggcataatcagaaatccgaaataaacctaggggcattatcggaaatgaaaagtagctcactcaatataaaaatctaggaaccctagttttcgttatcactctgtgctccctcgctctatttctcagtctctgtgtttgcggctgaggattccgaacgagtgaccttcttcgtttctcgcaaaggtaacagcctctgctcttgtctcttcgattcgatctatgcctgtctcttatttacgatgatgtttcttcggttatgtttttttatttatgctttatgctgttgatgttcggttgtttgtttcgctttgtttttgtggttcagttttttaggattcttttggtttttgaatcgattaatcggaagagattttcgagttatttggtgtgttggaggtgaatcttttttttgaggtcatagatctgttgtatttgtgttataaacatgcgactttgtatgattttttacgaggttatgatgttctggttgttttattatgaatctgttgagacagaaccatgatttttgttgatgttcgtttacactattaaaggtttgttttaacaggattaaaagttttttaagcatgttgaaggagtcttgtagatatgtaaccgtcgatagtttttttgtgggtttgttcacatgttatcaagcttaatcttttactatgtatgcgaccatatctggatccagcaaaggcgattttttaattccttgtgaaacttttgtaatatgaagttgaaattttgttattggtaaactataaatgtgtgaagttggagtatacctttaccttcttatttggctttgtgatagtttaatttatatgtattttgagttctgacttgtatttctttgaattgattctagtttaagtaatccatggacaaaaagtactcaatagggctcgacatagggactaactccgttggatgggccgtcatcaccgacgagtacaaggtgccctccaagaagttcaaggtgttgggaaacaccgacaggcacagcataaagaagaatttgatcggtgccctcctcttcgactccggagagaccgctgaggctaccaggctcaagaggaccgctagaaggcgctacaccagaaggaagaacagaatctgctacctgcaggagatcttctccaacgagatggccaaggtggacgactccttcttccaccgccttgaggaatcattcctggtggaggaggataaaaagcacgagagacacccaatcttcgggaacatcgtcgacgaggtggcctaccatgaaaagtaccctaccatctaccacctgaggaagaagctggtcgactctaccgacaaggctgacttgcgcttgatttacctggctctcgctcacatgataaagttccgcggacacttcctcattgagggagacctgaacccagacaactccgacgtggacaagctcttcatccagctcgttcagacctacaaccagcttttcgaggagaacccaatcaacgccagtggagttgacgccaaggctatcctctctgctcgtctgtcaaagtccaggaggcttgagaacttgattgcccagctgcctggcgaaaagaagaacggactgttcggaaacttgatcgctctctccctgggattgactcccaacttcaagtccaacttcgacctcgccgaggacgctaagttgcagttgtctaaagacacctacgacgatgacctcgacaacttgctggcccagataggcgaccaatacgccgatctcttcctcgccgctaagaacttgtccgacgcaatcctgctgtccgacatcctgagagtcaacactgagattaccaaagctcctctgtctgcttccatgattaagcgctacgacgagcaccaccaagatctgaccctgctcaaggccctggtgagacagcagctgcccgagaagtacaaggagatctttttcgaccagtccaagaacggctacgccggatacattgacggaggcgcctcccaggaagagttctacaagttcatcaagcccatccttgagaagatggacggtaccgaggagctgttggtgaagttgaacagagaggacctgttgaggaagcagagaaccttcgacaacggaagcatccctcaccaaatccacctgggagagctccacgccatcttgaggaggcaggaggatttctatcccttcctgaaggacaaccgcgagaagattgagaagatcttgaccttcagaattccttactacgtcgggccactcgccagaggaaactctaggttcgcctggatgacccgcaaatctgaagagaccattactccctggaacttcgaggaagtcgtggacaagggcgcttccgctcagtctttcatcgagaggatgaccaacttcgataaaaatctgcccaacgagaaggtgctgcccaagcactccctgttgtacgagtatttcacagtgtacaacgagctcaccaaggtgaagtacgtcacagagggaatgaggaagcctgccttcttgtccggagagcagaagaaggccatcgtcgacctgctcttcaagaccaacaggaaggtgactgtcaagcagctgaaggaggactacttcaagaagatcgagtgcttcgactccgtcgagatctctggtgtcgaggacaggttcaacgcctcccttgggacttaccacgatctgctcaagattattaaagacaaggacttcctggacaacgaggagaacgaggacatccttgaggacatcgtgctcaccctgaccttgttcgaagacagggaaatgatcgaagagaggctcaagacctacgcccacctcttcgacgacaaggtgatgaaacagctgaagagacgcagatataccggctggggaaggctctcccgcaaattgatcaacgggatcagggacaagcagtcagggaagactatactcgacttcctgaagtccgacggattcgccaacaggaacttcatgcagctcattcacgacgactccttgaccttcaaggaggacatccagaaggctcaggtgtctggacagggtgactccttgcatgagcacattgctaacttggccggctctcccgctattaagaagggcattttgcagaccgtgaaggtcgttgacgagctcgtgaaggtgatgggacgccacaagccagagaacatcgttattgagatggctcgcgagaaccaaactacccagaaagggcagaagaattcccgcgagaggatgaagcgcattgaggagggcataaaagagcttggctctcagatcctcaaggagcaccccgtcgagaacactcagctgcagaacgagaagctgtacctgtactacctccaaaacggaagggacatgtacgtggaccaggagctggacatcaacaggttgtccgactacgacgtcgaccacatcgtgcctcagtccttcctgaaggatgactccatcgacaataaagtgctgacacgctccgataaaaatagaggcaagtccgacaacgtcccctccgaggaggtcgtgaagaagatgaaaaactactggagacagctcttgaacgccaagctcatcacccagcgtaagttcgacaacctgactaaggctgagagaggaggattgtccgagctcgataaggccggattcatcaagagacagctcgtcgaaacccgccaaattaccaagcacgtggcccaaattctggattcccgcatgaacaccaagtacgatgaaaatgacaagctgatccgcgaggtcaaggtgatcaccttgaagtccaagctggtctccgacttccgcaaggacttccagttctacaaggtgagggagatcaacaactaccaccacgcacacgacgcctacctcaacgctgtcgttggaaccgccctcatcaaaaaatatcctaagctggagtctgagttcgtctacggcgactacaaggtgtacgacgtgaggaagatgatcgctaagtctgagcaggagatcggcaaggccaccgccaagtacttcttctactccaacatcatgaacttcttcaagaccgagatcactctcgccaacggtgagatcaggaagcgcccactgatcgagaccaacggtgagactggagagatcgtgtgggacaaagggagggatttcgctactgtgaggaaggtgctctccatgcctcaggtgaacatcgtcaagaagaccgaagttcagaccggaggattctccaaggagtccatcctccccaagagaaactccgacaagctgatcgctagaaagaaagactgggaccctaagaagtacggaggcttcgattctcctaccgtggcctactctgtgctggtcgtggccaaggtggagaagggcaagtccaagaagctgaaatccgtcaaggagctcctcgggattaccatcatggagaggagttccttcgagaagaaccctatcgacttcctggaggccaagggatataaagaggtgaagaaggacctcatcatcaagctgcccaagtactccctcttcgagttggagaacggaaggaagaggatgctggcttctgccggagagttgcagaagggaaatgagctcgcccttccctccaagtacgtgaacttcctgtacctcgcctctcactatgaaaagttgaagggctctcctgaggacaacgagcagaagcagctcttcgtggagcagcacaagcactacctggacgaaattatcgagcagatctctgagttctccaagcgcgtgatattggccgacgccaacctcgacaaggtgctgtccgcctacaacaagcacagggataagcccattcgcgagcaggctgaaaacattatccacctgtttaccctcacaaacttgggagcccctgctgccttcaagtacttcgacaccaccattgacaggaagagatacacctccaccaaggaggtgctcgacgcaacactcatccaccaatccatcaccggcctctatgaaacaaggattgacttgtcccagctgggaggcgactctagagccgatcccaagaagaagagaaaggtgtaggttaacctagacttgtccatcttctggattggccaacttaattaatgtatgaaataaaaggatgcacacatagtgacatgctaatcactataatgtgggcatcaaagttgtgtgttatgtgtaattactagttatctgaataaaagagaaagagatcatccatatttcttatcctaaatgaatgtcacgtgtctttataattctttgatgaaccagatgcatttcattaaccaaatccatatacatataaatattaatcatatataattaatatcaattgggttagcaaaacaaatctagtctaggtgtgttttgcgaattcgatatcaagcttatcgataccgtcgagggggggcccggtaccggcgcgccgttctatagtgtcacctaaatcgtatgtgtatgatacataaggttatgtattaattgtagccgcgttctaacgacaatatgtccatatggtgcactctcagtacaatctgctctgatgccgcatagttaagccagccccgacacccgccaacacccgctgacgcgccctgacgggcttgtctgctcccggcatccgcttacagacaagctgtgaccgtctccgggagctgcatgtgtcagaggttttcaccgtcatcaccgaaacgcgcgagacgaaagggcctcgtgatacgcctatttttataggttaatgtcatgaccaaaatcccttaacgtgagttttcgttccactgagcgtcagaccccgtagaaaagatcaaaggatcttcttgagatcctttttttctgcgcgtaatctgctgcttgcaaacaaaaaaaccaccgctaccagcggtggtttgtttgccggatcaagagctaccaactctttttccgaaggtaactggcttcagcagagcgcagataccaaatactgtccttctagtgtagccgtagttaggccaccacttcaagaactctgtagcaccgcctacatacctcgctctgctaatcctgttaccagtggctgctgccagtggcgataagtcgtgtcttaccgggttggactcaagacgatagttaccggataaggcgcagcggtcgggctgaacggggggttcgtgcacacagcccagcttggagcgaacgacctacaccgaactgagatacctacagcgtgagcattgagaaagcgccacgcttcccgaagggagaaaggcggacaggtatccggtaagcggcagggtcggaacaggagagcgcacgagggagcttccagggggaaacgcctggtatctttatagtcctgtcgggtttcgccacctctgacttgagcgtcgatttttgtgatgctcgtcaggggggcggagcctatggaaaaacgccagcaacgcggcctttttacggttcctggccttttgctggccttttgctcacatgttctttcctgcgttatcccctgattctgtggataaccgtattaccgcctttgagtgagctgataccgctcgccgcagccgaacgaccgagcgcagcgagtcagtgagcgaggaagcggaagagcgcccaatacgcaaaccgcctctccccgcgcgttggccgattcattaatgcaggttgatcagatctcgatcccgcgaaattaatacgactcactatagggagaccacaacggtttccctctagaaataattttgtttaactttaagaaggagatatacccatggaaaagcctgaactcaccgcgacgtctgtcgagaagtttctgatcgaaaagttcgacagcgtctccgacctgatgcagctctcggagggcgaagaatctcgtgctttcagcttcgatgtaggagggcgtggatatgtcctgcgggtaaatagctgcgccgatggtttctacaaagatcgttatgtttatcggcactttgcatcggccgcgctcccgattccggaagtgcttgacattggggaattcagcgagagcctgacctattgcatctcccgccgtgcacagggtgtcacgttgcaagacctgcctgaaaccgaactgcccgctgttctgcagccggtcgcggaggctatggatgcgatcgctgcggccgatcttagccagacgagcgggttcggcccattcggaccgcaaggaatcggtcaatacactacatggcgtgatttcatatgcgcgattgctgatccccatgtgtatcactggcaaactgtgatggacgacaccgtcagtgcgtccgtcgcgcaggctctcgatgagctgatgctttgggccgaggactgccccgaagtccggcacctcgtgcacgcggatttcggctccaacaatgtcctgacggacaatggccgcataacagcggtcattgactggagcgaggcgatgttcggggattcccaatacgaggtcgccaacatcttcttctggaggccgtggttggcttgtatggagcagcagacgcgctacttcgagcggaggcatccggagcttgcaggatcgccgcggctccgggcgtatatgctccgcattggtcttgaccaactctatcagagcttggttgacggcaatttcgatgatgcagcttgggcgcagggtcgatgcgacgcaatcgtccgatccggagccgggactgtcgggcgtacacaaatcgcccgcagaagcgcggccgtctggaccgatggctgtgtagaagtactcgccgatagtggaaaccgacgccccagcactcgtccgagggcaaaggaatagtgaggtacagcttggatcgatccggctgctaacaaagcccgaaaggaagctgagttggctgctgccaccgctgagcaataactagcataaccccttggggcctctaaacgggtcttgaggggttttttgctgaaaggaggaactatatccggatgatcgggcgcgccggtac

SEQ ID NO: 545 - DNA, 9093 bp, Artificial sequence
  QC881
ccgggtgtgatttagtataaagtgaagtaatggtcaaaagaaaaagtgtaaaacgaagtacctagtaataagtaatattgaacaaaataaatggtaaagtgtcagatatataaaataggctttaataaaaggaagaaaaaaaacaaacaaaaaataggttgcaatggggcagagcagagtcatcatgaagctagaaaggctaccgatagataaactatagttaattaaatacattaaaaaatacttggatctttctcttaccctgtttatattgagacctgaaacttgagagagatacactaatcttgccttgttgtttcattccctaacttacaggactcagcgcatgtcatgtggtctcgttccccatttaagtcccacaccgtctaaacttattaaattattaatgtttataactagatgcacaacaacaaagcttgggcgtcggtgccgatcatcgttttagagctagaaatagcaagttaaaataaggctagtccgttatcaacttgaaaaagtggcaccgagtcggtgcttttttttgcggccgcaattggatcgggtttacttattttgtgggtatctatacttttattagatttttaatcaggctcctgatttctttttatttcgattgaattcctgaacttgtattattcagtagatcgaataaattataaaaagataaaatcataaaataatattttatcctatcaatcatattaaagcaatgaatatgtaaaattaatcttatctttattttaaaaaatcatataggtttagtatttttttaaaaataaagataggattagttttactattcactgcttattacttttaaaaaaatcataaaggtttagtatttttttaaaataaatataggaatagttttactattcactgctttaatagaaaaatagtttaaaatttaagatagttttaatcccagcatttgccacgtttgaacgtgagccgaaacgatgtcgttacattatcttaacctagctgaaacgatgtcgtcataatatcgccaaatgccaactggactacgtcgaacccacaaatcccacaaagcgcgtgaaatcaaatcgctcaaaccacaaaaaagaacaacgcgtttgttacacgctcaatcccacgcgagtagagcacagtaaccttcaaataagcgaatggggcataatcagaaatccgaaataaacctaggggcattatcggaaatgaaaagtagctcactcaatataaaaatctaggaaccctagttttcgttatcactctgtgctccctcgctctatttctcagtctctgtgtttgcggctgaggattccgaacgagtgaccttcttcgtttctcgcaaaggtaacagcctctgctcttgtctcttcgattcgatctatgcctgtctcttatttacgatgatgtttcttcggttatgtttttttatttatgctttatgctgttgatgttcggttgtttgtttcgctttgtttttgtggttcagttttttaggattcttttggtttttgaatcgattaatcggaagagattttcgagttatttggtgtgttggaggtgaatcttttttttgaggtcatagatctgttgtatttgtgttataaacatgcgactttgtatgattttttacgaggttatgatgttctggttgttttattatgaatctgttgagacagaaccatgatttttgttgatgttcgtttacactattaaaggtttgttttaacaggattaaaagttttttaagcatgttgaaggagtcttgtagatatgtaaccgtcgatagtttttttgtgggtttgttcacatgttatcaagcttaatcttttactatgtatgcgaccatatctggatccagcaaaggcgattttttaattccttgtgaaacttttgtaatatgaagttgaaattttgttattggtaaactataaatgtgtgaagttggagtatacctttaccttcttatttggctttgtgatagtttaatttatatgtattttgagttctgacttgtatttctttgaattgattctagtttaagtaatccatggacaaaaagtactcaatagggctcgacatagggactaactccgttggatgggccgtcatcaccgacgagtacaaggtgccctccaagaagttcaaggtgttgggaaacaccgacaggcacagcataaagaagaatttgatcggtgccctcctcttcgactccggagagaccgctgaggctaccaggctcaagaggaccgctagaaggcgctacaccagaaggaagaacagaatctgctacctgcaggagatcttctccaacgagatggccaaggtggacgactccttcttccaccgccttgaggaatcattcctggtggaggaggataaaaagcacgagagacacccaatcttcgggaacatcgtcgacgaggtggcctaccatgaaaagtaccctaccatctaccacctgaggaagaagctggtcgactctaccgacaaggctgacttgcgcttgatttacctggctctcgctcacatgataaagttccgcggacacttcctcattgagggagacctgaacccagacaactccgacgtggacaagctcttcatccagctcgttcagacctacaaccagcttttcgaggagaacccaatcaacgccagtggagttgacgccaaggctatcctctctgctcgtctgtcaaagtccaggaggcttgagaacttgattgcccagctgcctggcgaaaagaagaacggactgttcggaaacttgatcgctctctccctgggattgactcccaacttcaagtccaacttcgacctcgccgaggacgctaagttgcagttgtctaaagacacctacgacgatgacctcgacaacttgctggcccagataggcgaccaatacgccgatctcttcctcgccgctaagaacttgtccgacgcaatcctgctgtccgacatcctgagagtcaacactgagattaccaaagctcctctgtctgcttccatgattaagcgctacgacgagcaccaccaagatctgaccctgctcaaggccctggtgagacagcagctgcccgagaagtacaaggagatctttttcgaccagtccaagaacggctacgccggatacattgacggaggcgcctcccaggaagagttctacaagttcatcaagcccatccttgagaagatggacggtaccgaggagctgttggtgaagttgaacagagaggacctgttgaggaagcagagaaccttcgacaacggaagcatccctcaccaaatccacctgggagagctccacgccatcttgaggaggcaggaggatttctatcccttcctgaaggacaaccgcgagaagattgagaagatcttgaccttcagaattccttactacgtcgggccactcgccagaggaaactctaggttcgcctggatgacccgcaaatctgaagagaccattactccctggaacttcgaggaagtcgtggacaagggcgcttccgctcagtctttcatcgagaggatgaccaacttcgataaaaatctgcccaacgagaaggtgctgcccaagcactccctgttgtacgagtatttcacagtgtacaacgagctcaccaaggtgaagtacgtcacagagggaatgaggaagcctgccttcttgtccggagagcagaagaaggccatcgtcgacctgctcttcaagaccaacaggaaggtgactgtcaagcagctgaaggaggactacttcaagaagatcgagtgcttcgactccgtcgagatctctggtgtcgaggacaggttcaacgcctcccttgggacttaccacgatctgctcaagattattaaagacaaggacttcctggacaacgaggagaacgaggacatccttgaggacatcgtgctcaccctgaccttgttcgaagacagggaaatgatcgaagagaggctcaagacctacgcccacctcttcgacgacaaggtgatgaaacagctgaagagacgcagatataccggctggggaaggctctcccgcaaattgatcaacgggatcagggacaagcagtcagggaagactatactcgacttcctgaagtccgacggattcgccaacaggaacttcatgcagctcattcacgacgactccttgaccttcaaggaggacatccagaaggctcaggtgtctggacagggtgactccttgcatgagcacattgctaacttggccggctctcccgctattaagaagggcattttgcagaccgtgaaggtcgttgacgagctcgtgaaggtgatgggacgccacaagccagagaacatcgttattgagatggctcgcgagaaccaaactacccagaaagggcagaagaattcccgcgagaggatgaagcgcattgaggagggcataaaagagcttggctctcagatcctcaaggagcaccccgtcgagaacactcagctgcagaacgagaagctgtacctgtactacctccaaaacggaagggacatgtacgtggaccaggagctggacatcaacaggttgtccgactacgacgtcgaccacatcgtgcctcagtccttcctgaaggatgactccatcgacaataaagtgctgacacgctccgataaaaatagaggcaagtccgacaacgtcccctccgaggaggtcgtgaagaagatgaaaaactactggagacagctcttgaacgccaagctcatcacccagcgtaagttcgacaacctgactaaggctgagagaggaggattgtccgagctcgataaggccggattcatcaagagacagctcgtcgaaacccgccaaattaccaagcacgtggcccaaattctggattcccgcatgaacaccaagtacgatgaaaatgacaagctgatccgcgaggtcaaggtgatcaccttgaagtccaagctggtctccgacttccgcaaggacttccagttctacaaggtgagggagatcaacaactaccaccacgcacacgacgcctacctcaacgctgtcgttggaaccgccctcatcaaaaaatatcctaagctggagtctgagttcgtctacggcgactacaaggtgtacgacgtgaggaagatgatcgctaagtctgagcaggagatcggcaaggccaccgccaagtacttcttctactccaacatcatgaacttcttcaagaccgagatcactctcgccaacggtgagatcaggaagcgcccactgatcgagaccaacggtgagactggagagatcgtgtgggacaaagggagggatttcgctactgtgaggaaggtgctctccatgcctcaggtgaacatcgtcaagaagaccgaagttcagaccggaggattctccaaggagtccatcctccccaagagaaactccgacaagctgatcgctagaaagaaagactgggaccctaagaagtacggaggcttcgattctcctaccgtggcctactctgtgctggtcgtggccaaggtggagaagggcaagtccaagaagctgaaatccgtcaaggagctcctcgggattaccatcatggagaggagttccttcgagaagaaccctatcgacttcctggaggccaagggatataaagaggtgaagaaggacctcatcatcaagctgcccaagtactccctcttcgagttggagaacggaaggaagaggatgctggcttctgccggagagttgcagaagggaaatgagctcgcccttccctccaagtacgtgaacttcctgtacctcgcctctcactatgaaaagttgaagggctctcctgaggacaacgagcagaagcagctcttcgtggagcagcacaagcactacctggacgaaattatcgagcagatctctgagttctccaagcgcgtgatattggccgacgccaacctcgacaaggtgctgtccgcctacaacaagcacagggataagcccattcgcgagcaggctgaaaacattatccacctgtttaccctcacaaacttgggagcccctgctgccttcaagtacttcgacaccaccattgacaggaagagatacacctccaccaaggaggtgctcgacgcaacactcatccaccaatccatcaccggcctctatgaaacaaggattgacttgtcccagctgggaggcgactctagagccgatcccaagaagaagagaaaggtgtaggttaacctagacttgtccatcttctggattggccaacttaattaatgtatgaaataaaaggatgcacacatagtgacatgctaatcactataatgtgggcatcaaagttgtgtgttatgtgtaattactagttatctgaataaaagagaaagagatcatccatatttcttatcctaaatgaatgtcacgtgtctttataattctttgatgaaccagatgcatttcattaaccaaatccatatacatataaatattaatcatatataattaatatcaattgggttagcaaaacaaatctagtctaggtgtgttttgcgaattcgatatcaagcttatcgataccgtcgagggggggcccggtaccggcgcgccgttctatagtgtcacctaaatcgtatgtgtatgatacataaggttatgtattaattgtagccgcgttctaacgacaatatgtccatatggtgcactctcagtacaatctgctctgatgccgcatagttaagccagccccgacacccgccaacacccgctgacgcgccctgacgggcttgtctgctcccggcatccgcttacagacaagctgtgaccgtctccgggagctgcatgtgtcagaggttttcaccgtcatcaccgaaacgcgcgagacgaaagggcctcgtgatacgcctatttttataggttaatgtcatgaccaaaatcccttaacgtgagttttcgttccactgagcgtcagaccccgtagaaaagatcaaaggatcttcttgagatcctttttttctgcgcgtaatctgctgcttgcaaacaaaaaaaccaccgctaccagcggtggtttgtttgccggatcaagagctaccaactctttttccgaaggtaactggcttcagcagagcgcagataccaaatactgtccttctagtgtagccgtagttaggccaccacttcaagaactctgtagcaccgcctacatacctcgctctgctaatcctgttaccagtggctgctgccagtggcgataagtcgtgtcttaccgggttggactcaagacgatagttaccggataaggcgcagcggtcgggctgaacggggggttcgtgcacacagcccagcttggagcgaacgacctacaccgaactgagatacctacagcgtgagcattgagaaagcgccacgcttcccgaagggagaaaggcggacaggtatccggtaagcggcagggtcggaacaggagagcgcacgagggagcttccagggggaaacgcctggtatctttatagtcctgtcgggtttcgccacctctgacttgagcgtcgatttttgtgatgctcgtcaggggggcggagcctatggaaaaacgccagcaacgcggcctttttacggttcctggccttttgctggccttttgctcacatgttctttcctgcgttatcccctgattctgtggataaccgtattaccgcctttgagtgagctgataccgctcgccgcagccgaacgaccgagcgcagcgagtcagtgagcgaggaagcggaagagcgcccaatacgcaaaccgcctctccccgcgcgttggccgattcattaatgcaggttgatcagatctcgatcccgcgaaattaatacgactcactatagggagaccacaacggtttccctctagaaataattttgtttaactttaagaaggagatatacccatggaaaagcctgaactcaccgcgacgtctgtcgagaagtttctgatcgaaaagttcgacagcgtctccgacctgatgcagctctcggagggcgaagaatctcgtgctttcagcttcgatgtaggagggcgtggatatgtcctgcgggtaaatagctgcgccgatggtttctacaaagatcgttatgtttatcggcactttgcatcggccgcgctcccgattccggaagtgcttgacattggggaattcagcgagagcctgacctattgcatctcccgccgtgcacagggtgtcacgttgcaagacctgcctgaaaccgaactgcccgctgttctgcagccggtcgcggaggctatggatgcgatcgctgcggccgatcttagccagacgagcgggttcggcccattcggaccgcaaggaatcggtcaatacactacatggcgtgatttcatatgcgcgattgctgatccccatgtgtatcactggcaaactgtgatggacgacaccgtcagtgcgtccgtcgcgcaggctctcgatgagctgatgctttgggccgaggactgccccgaagtccggcacctcgtgcacgcggatttcggctccaacaatgtcctgacggacaatggccgcataacagcggtcattgactggagcgaggcgatgttcggggattcccaatacgaggtcgccaacatcttcttctggaggccgtggttggcttgtatggagcagcagacgcgctacttcgagcggaggcatccggagcttgcaggatcgccgcggctccgggcgtatatgctccgcattggtcttgaccaactctatcagagcttggttgacggcaatttcgatgatgcagcttgggcgcagggtcgatgcgacgcaatcgtccgatccggagccgggactgtcgggcgtacacaaatcgcccgcagaagcgcggccgtctggaccgatggctgtgtagaagtactcgccgatagtggaaaccgacgccccagcactcgtccgagggcaaaggaatagtgaggtacagcttggatcgatccggctgctaacaaagcccgaaaggaagctgagttggctgctgccaccgctgagcaataactagcataaccccttggggcctctaaacgggtcttgaggggttttttgctgaaaggaggaactatatccggatgatcgggcgcgccggtac

SEQ ID NO: 546 - DNA, 1113 bp, Artificial sequence
  RTW1026A
agcttggtaccgagctcggatccactagtatggcggccaccgcttccagaaccacccgattctcttcttcctcttcacaccccaccttccccaaacgcattactagatccaccctccctctctctcatcaaaccctcaccaaacccaaccacgctctcaaaatcaaatgttccatctccaaaccccccacggcggcgcccttcaccaaggaagcgccgaccacggagcccttcgtgtcacggttcgcctccggcgaacctcgcaagggcgcggacatccttgtggaggcgctggagaggcagggcgtgacgacggtgttcgcgtaccccggcggtgcgtcgatggagatccaccaggcgctcacgcgctccgccgccatccgcaacgtgctcccgcgccacgagcagggcggcgtcttcgccgccgaaggctacgcgcgttcctccggcctccccggcgtctgcattgccacctccggccccggcgccaccaacctcgtgagcggcctcgccgacgctttaatggacagcgtcccagtcgtcgccatcaccggccaggtcagccgtcgcatgatcggtaccgacgccttccaagaaaccccgatcgtggaggtgagcagatccatcacgaagcacaactacctcatcctcgacgtcgacgacatcccccgcgtcgtcgccgaggctttcttcgtcgccacctccggccgccccggtccggtcctcatcgacattcccaaagacgttcagcagcaactcgccgtgcctaattgggacgagcccgttaacctccccggttacctcgccaggctgcccaggccccccgccgaggcccaattggaacacattgtcagactcatcatggaggcccaaaagcccgttctctacgtcggcggtggcagtttgaattccagtgctgaattgaggcgctttgttgaactcactggtattcccgttgctagcactttaatgggtcttggaacttttcctattggtgatgaatattcccttcagatgctgggtatgcatggtactgtttatgctaactatgctgttgacaatagtgatttgttgcttgcctttggggtaaggtttgatgaccgtgttactggga

SEQ ID NO: 547 - DNA, 17 bp, Artificial
  WOL900, Forward_primer
atcaccggccaggtcag

SEQ ID NO: 548 - DNA, 25 bp, Artificial
  WOL578, Reverse_primer
acttaccctccactcctttctcctc

SEQ ID NO: 549 - DNA, 29 bp, Artificial
  WOL573, Forward_primer
atggcggccaccgcttccagaaccacccg

SEQ ID NO: 550 - protein, 638 aa, zea mays
MATAAAASTALTGATTAAPKARRRAHLLATRRALAAPIRCSAASPAMPMAPPATPLRPWGPTEPRKGADILVESLERCGVRDVFAYPGGASMEIHQALTRSPVIANHLFRHEQGEAFAASGYARSSGRVGVCIATSGPGATNLVSALADALLDSVPMVAITGQVPRRMIGTDAFQETPIVEVTRSITKHNYLVLDVDDIPRVVQEAFFLASSGRPGPVLVDIPKDIQQQMAVPVWDKPMSLPGYIARLPKPPATELLEQVLRLVGESRRPVLYVGGGCAASGEELRRFVELTGIPVTTTLMGLGNFPSDDPLSLRMLGMHGTVYANYAVDKADLLLALGVRFDDRVTGKIEAFASRAKIVHVDIDPAEIGKNKQPHVSICADVKLALQGMNALLEGSTSKKSFDFGSWNDELDQQKREFPLGYKTSNEEIQPQYAIQVLDELTKGEAIIGTGVGQHQMWAAQYYTYKRPRQWLSSAGLGAMGFGLPAAAGASVANPGVTVVDIDGDGSFLMNVQELAMIRIENLPVKVFVLNNQHLGMVVQWEDRFYKANRAHTYLGNPENESEIYPDFVTIAKGFNIPAVRVTKKNEVRAAIKKMLETPGPYLLDIIVPHQEHVLPMIPSGGAFKDMILDGDGRTVY

SEQ ID NO: 551 - DNA, 23 bp, Artificial
  soy FAD2-1-CR1, Cas9 target sequence
gtgtttggaacccttgagagagg

SEQ ID NO: 552 - DNA, 22 bp, Artificial
  soy FAD2-1-CR2, Cas9 target sequence
caaagccaccattcactgttgg

SEQ ID NO: 553 - DNA, 9174 bp, Artificial sequence
  RTW1211
atgagaaagcgccacgcttcccgaagggagaaaggcggacaggtatccggtaagcggcagggtcggaacaggagagcgcacgagggagcttccagggggaaacgcctggtatctttatagtcctgtcgggtttcgccacctctgacttgagcgtcgatttttgtgatgctcgtcaggggggcggagcctatggaaaaacgccagcaacgcggcctttttacggttcctggccttttgctggccttttgctcacatgttctttcctgcgttatcccctgattctgtggataaccgtattaccgcctttgagtgagctgataccgctcgccgcagccgaacgaccgagcgcagcgagtcagtgagcgaggaagcggaagagcgcccaatacgcaaaccgcctctccccgcgcgttggccgattcattaatgcaggttgatcagatctcgatcccgcgaaattaatacgactcactatagggagaccacaacggtttccctctagaaataattttgtttaactttaagaaggagatatacccatggaaaagcctgaactcaccgcgacgtctgtcgagaagtttctgatcgaaaagttcgacagcgtctccgacctgatgcagctctcggagggcgaagaatctcgtgctttcagcttcgatgtaggagggcgtggatatgtcctgcgggtaaatagctgcgccgatggtttctacaaagatcgttatgtttatcggcactttgcatcggccgcgctcccgattccggaagtgcttgacattggggaattcagcgagagcctgacctattgcatctcccgccgtgcacagggtgtcacgttgcaagacctgcctgaaaccgaactgcccgctgttctgcagccggtcgcggaggctatggatgcgatcgctgcggccgatcttagccagacgagcgggttcggcccattcggaccgcaaggaatcggtcaatacactacatggcgtgatttcatatgcgcgattgctgatccccatgtgtatcactggcaaactgtgatggacgacaccgtcagtgcgtccgtcgcgcaggctctcgatgagctgatgctttgggccgaggactgccccgaagtccggcacctcgtgcacgcggatttcggctccaacaatgtcctgacggacaatggccgcataacagcggtcattgactggagcgaggcgatgttcggggattcccaatacgaggtcgccaacatcttcttctggaggccgtggttggcttgtatggagcagcagacgcgctacttcgagcggaggcatccggagcttgcaggatcgccgcggctccgggcgtatatgctccgcattggtcttgaccaactctatcagagcttggttgacggcaatttcgatgatgcagcttgggcgcagggtcgatgcgacgcaatcgtccgatccggagccgggactgtcgggcgtacacaaatcgcccgcagaagcgcggccgtctggaccgatggctgtgtagaagtactcgccgatagtggaaaccgacgccccagcactcgtccgagggcaaaggaatagtgaggtacagcttggatcgatccggctgctaacaaagcccgaaaggaagctgagttggctgctgccaccgctgagcaataactagcataaccccttggggcctctaaacgggtcttgaggggttttttgctgaaaggaggaactatatccggatgctcgggcgcgccggtacccgggtgtgatttagtataaagtgaagtaatggtcaaaagaaaaagtgtaaaacgaagtacctagtaataagtaatattgaacaaaataaatggtaaagtgtcagatatataaaataggctttaataaaaggaagaaaaaaaacaaacaaaaaataggttgcaatggggcagagcagagtcatcatgaagctagaaaggctaccgatagataaactatagttaattaaatacattaaaaaatacttggatctttctcttaccctgtttatattgagacctgaaacttgagagagatacactaatcttgccttgttgtttcattccctaacttacaggactcagcgcatgtcatgtggtctcgttccccatttaagtcccacaccgtctaaacttattaaattattaatgtttataactagatgcacaacaacaaagcttgtgtttggaacccttgagaggttttagagctagaaatagcaagttaaaataaggctagtccgttatcaacttgaaaaagtggcaccgagtcggtgcttttttttgcggccgcaattggatcgggtttacttattttgtgggtatctatacttttattagatttttaatcaggctcctgatttctttttatttcgattgaattcctgaacttgtattattcagtagatcgaataaattataaaaagataaaatcataaaataatattttatcctatcaatcatattaaagcaatgaatatgtaaaattaatcttatctttattttaaaaaatcatataggtttagtatttttttaaaaataaagataggattagttttactattcactgcttattacttttaaaaaaatcataaaggtttagtatttttttaaaataaatataggaatagttttactattcactgctttaatagaaaaatagtttaaaatttaagatagttttaatcccagcatttgccacgtttgaacgtgagccgaaacgatgtcgttacattatcttaacctagctgaaacgatgtcgtcataatatcgccaaatgccaactggactacgtcgaacccacaaatcccacaaagcgcgtgaaatcaaatcgctcaaaccacaaaaaagaacaacgcgtttgttacacgctcaatcccacgcgagtagagcacagtaaccttcaaataagcgaatggggcataatcagaaatccgaaataaacctaggggcattatcggaaatgaaaagtagctcactcaatataaaaatctaggaaccctagttttcgttatcactctgtgctccctcgctctatttctcagtctctgtgtttgcggctgaggattccgaacgagtgaccttcttcgtttctcgcaaaggtaacagcctctgctcttgtctcttcgattcgatctatgcctgtctcttatttacgatgatgtttcttcggttatgtttttttatttatgctttatgctgttgatgttcggttgtttgtttcgctttgtttttgtggttcagttttttaggattcttttggtttttgaatcgattaatcggaagagattttcgagttatttggtgtgttggaggtgaatcttttttttgaggtcatagatctgttgtatttgtgttataaacatgcgactttgtatgattttttacgaggttatgatgttctggttgttttattatgaatctgttgagacagaaccatgatttttgttgatgttcgtttacactattaaaggtttgttttaacaggattaaaagttttttaagcatgttgaaggagtcttgtagatatgtaaccgtcgatagtttttttgtgggtttgttcacatgttatcaagcttaatcttttactatgtatgcgaccatatctggatccagcaaaggcgattttttaattccttgtgaaacttttgtaatatgaagttgaaattttgttattggtaaactataaatgtgtgaagttggagtatacctttaccttcttatttggctttgtgatagtttaatttatatgtattttgagttctgacttgtatttctttgaattgattctagtttaagtaatccatggcaccgaagaagaagcgcaaggtgatggacaaaaagtactcaatagggctcgacatagggactaactccgttggatgggccgtcatcaccgacgagtacaaggtgccctccaagaagttcaaggtgttgggaaacaccgacaggcacagcataaagaagaatttgatcggtgccctcctcttcgactccggagagaccgctgaggctaccaggctcaagaggaccgctagaaggcgctacaccagaaggaagaacagaatctgctacctgcaggagatcttctccaacgagatggccaaggtggacgactccttcttccaccgccttgaggaatcattcctggtggaggaggataaaaagcacgagagacacccaatcttcgggaacatcgtcgacgaggtggcctaccatgaaaagtaccctaccatctaccacctgaggaagaagctggtcgactctaccgacaaggctgacttgcgcttgatttacctggctctcgctcacatgataaagttccgcggacacttcctcattgagggagacctgaacccagacaactccgacgtggacaagctcttcatccagctcgttcagacctacaaccagcttttcgaggagaacccaatcaacgccagtggagttgacgccaaggctatcctctctgctcgtctgtcaaagtccaggaggcttgagaacttgattgcccagctgcctggcgaaaagaagaacggactgttcggaaacttgatcgctctctccctgggattgactcccaacttcaagtccaacttcgacctcgccgaggacgctaagttgcagttgtctaaagacacctacgacgatgacctcgacaacttgctggcccagataggcgaccaatacgccgatctcttcctcgccgctaagaacttgtccgacgcaatcctgctgtccgacatcctgagagtcaacactgagattaccaaagctcctctgtctgcttccatgattaagcgctacgacgagcaccaccaagatctgaccctgctcaaggccctggtgagacagcagctgcccgagaagtacaaggagatctttttcgaccagtccaagaacggctacgccggatacattgacggaggcgcctcccaggaagagttctacaagttcatcaagcccatccttgagaagatggacggtaccgaggagctgttggtgaagttgaacagagaggacctgttgaggaagcagagaaccttcgacaacggaagcatccctcaccaaatccacctgggagagctccacgccatcttgaggaggcaggaggatttctatcccttcctgaaggacaaccgcgagaagattgagaagatcttgaccttcagaattccttactacgtcgggccactcgccagaggaaactctaggttcgcctggatgacccgcaaatctgaagagaccattactccctggaacttcgaggaagtcgtggacaagggcgcttccgctcagtctttcatcgagaggatgaccaacttcgataaaaatctgcccaacgagaaggtgctgcccaagcactccctgttgtacgagtatttcacagtgtacaacgagctcaccaaggtgaagtacgtcacagagggaatgaggaagcctgccttcttgtccggagagcagaagaaggccatcgtcgacctgctcttcaagaccaacaggaaggtgactgtcaagcagctgaaggaggactacttcaagaagatcgagtgcttcgactccgtcgagatctctggtgtcgaggacaggttcaacgcctcccttgggacttaccacgatctgctcaagattattaaagacaaggacttcctggacaacgaggagaacgaggacatccttgaggacatcgtgctcaccctgaccttgttcgaagacagggaaatgatcgaagagaggctcaagacctacgcccacctcttcgacgacaaggtgatgaaacagctgaagagacgcagatataccggctggggaaggctctcccgcaaattgatcaacgggatcagggacaagcagtcagggaagactatactcgacttcctgaagtccgacggattcgccaacaggaacttcatgcagctcattcacgacgactccttgaccttcaaggaggacatccagaaggctcaggtgtctggacagggtgactccttgcatgagcacattgctaacttggccggctctcccgctattaagaagggcattttgcagaccgtgaaggtcgttgacgagctcgtgaaggtgatgggacgccacaagccagagaacatcgttattgagatggctcgcgagaaccaaactacccagaaagggcagaagaattcccgcgagaggatgaagcgcattgaggagggcataaaagagcttggctctcagatcctcaaggagcaccccgtcgagaacactcagctgcagaacgagaagctgtacctgtactacctccaaaacggaagggacatgtacgtggaccaggagctggacatcaacaggttgtccgactacgacgtcgaccacatcgtgcctcagtccttcctgaaggatgactccatcgacaataaagtgctgacacgctccgataaaaatagaggcaagtccgacaacgtcccctccgaggaggtcgtgaagaagatgaaaaactactggagacagctcttgaacgccaagctcatcacccagcgtaagttcgacaacctgactaaggctgagagaggaggattgtccgagctcgataaggccggattcatcaagagacagctcgtcgaaacccgccaaattaccaagcacgtggcccaaattctggattcccgcatgaacaccaagtacgatgaaaatgacaagctgatccgcgaggtcaaggtgatcaccttgaagtccaagctggtctccgacttccgcaaggacttccagttctacaaggtgagggagatcaacaactaccaccacgcacacgacgcctacctcaacgctgtcgttggaaccgccctcatcaaaaaatatcctaagctggagtctgagttcgtctacggcgactacaaggtgtacgacgtgaggaagatgatcgctaagtctgagcaggagatcggcaaggccaccgccaagtacttcttctactccaacatcatgaacttcttcaagaccgagatcactctcgccaacggtgagatcaggaagcgcccactgatcgagaccaacggtgagactggagagatcgtgtgggacaaagggagggatttcgctactgtgaggaaggtgctctccatgcctcaggtgaacatcgtcaagaagaccgaagttcagaccggaggattctccaaggagtccatcctccccaagagaaactccgacaagctgatcgctagaaagaaagactgggaccctaagaagtacggaggcttcgattctcctaccgtggcctactctgtgctggtcgtggccaaggtggagaagggcaagtccaagaagctgaaatccgtcaaggagctcctcgggattaccatcatggagaggagttccttcgagaagaaccctatcgacttcctggaggccaagggatataaagaggtgaagaaggacctcatcatcaagctgcccaagtactccctcttcgagttggagaacggaaggaagaggatgctggcttctgccggagagttgcagaagggaaatgagctcgcccttccctccaagtacgtgaacttcctgtacctcgcctctcactatgaaaagttgaagggctctcctgaggacaacgagcagaagcagctcttcgtggagcagcacaagcactacctggacgaaattatcgagcagatctctgagttctccaagcgcgtgatattggccgacgccaacctcgacaaggtgctgtccgcctacaacaagcacagggataagcccattcgcgagcaggctgaaaacattatccacctgtttaccctcacaaacttgggagcccctgctgccttcaagtacttcgacaccaccattgacaggaagagatacacctccaccaaggaggtgctcgacgcaacactcatccaccaatccatcaccggcctctatgaaacaaggattgacttgtcccagctgggaggcgactctagagccgatcccaagaagaagagaaaggtgaagagaccacgggaccgccacgatggcgagctgggaggccgcaagcgggcaaggtaggttaacctagacttgtccatcttctggattggccaacttaattaatgtatgaaataaaaggatgcacacatagtgacatgctaatcactataatgtgggcatcaaagttgtgtgttatgtgtaattactagttatctgaataaaagagaaagagatcatccatatttcttatcctaaatgaatgtcacgtgtctttataattctttgatgaaccagatgcatttcattaaccaaatccatatacatataaatattaatcatatataattaatatcaattgggttagcaaaacaaatctagtctaggtgtgttttgcgaattcgatatcaagcttatcgataccgtcgagggggggcccggtaccggcgcgccgttctatagtgtcacctaaatcgtatgtgtatgatacataaggttatgtattaattgtagccgcgttctaacgacaatatgtccatatggtgcactctcagtacaatctgctctgatgccgcatagttaagccagccccgacacccgccaacacccgctgacgcgccctgacgggcttgtctgctcccggcatccgcttacagacaagctgtgaccgtctccgggagctgcatgtgtcagaggttttcaccgtcatcaccgaaacgcgcgagacgaaagggcctcgtgatacgcctatttttataggttaatgtcatgaccaaaatcccttaacgtgagttttcgttccactgagcgtcagaccccgtagaaaagatcaaaggatcttcttgagatcctttttttctgcgcgtaatctgctgcttgcaaacaaaaaaaccaccgctaccagcggtggtttgtttgccggatcaagagctaccaactctttttccgaaggtaactggcttcagcagagcgcagataccaaatactgttcttctagtgtagccgtagttaggccaccacttcaagaactctgtagcaccgcctacatacctcgctctgctaatcctgttaccagtggctgctgccagtggcgataagtcgtgtcttaccgggttggactcaagacgatagttaccggataaggcgcagcggtcgggctgaacggggggttcgtgcacacagcccagcttggagcgaacgacctacaccgaactgagatacctacagcgtgagct

SEQ ID NO: 554 - DNA, 9174 bp, Artificial sequence
  RTW1212
tgcacacagcccagcttggagcgaacgacctacaccgaactgagatacctacagcgtgagctatgagaaagcgccacgcttcccgaagggagaaaggcggacaggtatccggtaagcggcagggtcggaacaggagagcgcacgagggagcttccagggggaaacgcctggtatctttatagtcctgtcgggtttcgccacctctgacttgagcgtcgatttttgtgatgctcgtcaggggggcggagcctatggaaaaacgccagcaacgcggcctttttacggttcctggccttttgctggccttttgctcacatgttctttcctgcgttatcccctgattctgtggataaccgtattaccgcctttgagtgagctgataccgctcgccgcagccgaacgaccgagcgcagcgagtcagtgagcgaggaagcggaagagcgcccaatacgcaaaccgcctctccccgcgcgttggccgattcattaatgcaggttgatcagatctcgatcccgcgaaattaatacgactcactatagggagaccacaacggtttccctctagaaataattttgtttaactttaagaaggagatatacccatggaaaagcctgaactcaccgcgacgtctgtcgagaagtttctgatcgaaaagttcgacagcgtctccgacctgatgcagctctcggagggcgaagaatctcgtgctttcagcttcgatgtaggagggcgtggatatgtcctgcgggtaaatagctgcgccgatggtttctacaaagatcgttatgtttatcggcactttgcatcggccgcgctcccgattccggaagtgcttgacattggggaattcagcgagagcctgacctattgcatctcccgccgtgcacagggtgtcacgttgcaagacctgcctgaaaccgaactgcccgctgttctgcagccggtcgcggaggctatggatgcgatcgctgcggccgatcttagccagacgagcgggttcggcccattcggaccgcaaggaatcggtcaatacactacatggcgtgatttcatatgcgcgattgctgatccccatgtgtatcactggcaaactgtgatggacgacaccgtcagtgcgtccgtcgcgcaggctctcgatgagctgatgctttgggccgaggactgccccgaagtccggcacctcgtgcacgcggatttcggctccaacaatgtcctgacggacaatggccgcataacagcggtcattgactggagcgaggcgatgttcggggattcccaatacgaggtcgccaacatcttcttctggaggccgtggttggcttgtatggagcagcagacgcgctacttcgagcggaggcatccggagcttgcaggatcgccgcggctccgggcgtatatgctccgcattggtcttgaccaactctatcagagcttggttgacggcaatttcgatgatgcagcttgggcgcagggtcgatgcgacgcaatcgtccgatccggagccgggactgtcgggcgtacacaaatcgcccgcagaagcgcggccgtctggaccgatggctgtgtagaagtactcgccgatagtggaaaccgacgccccagcactcgtccgagggcaaaggaatagtgaggtacagcttggatcgatccggctgctaacaaagcccgaaaggaagctgagttggctgctgccaccgctgagcaataactagcataaccccttggggcctctaaacgggtcttgaggggttttttgctgaaaggaggaactatatccggatgctcgggcgcgccggtacccgggtgtgatttagtataaagtgaagtaatggtcaaaagaaaaagtgtaaaacgaagtacctagtaataagtaatattgaacaaaataaatggtaaagtgtcagatatataaaataggctttaataaaaggaagaaaaaaaacaaacaaaaaataggttgcaatggggcagagcagagtcatcatgaagctagaaaggctaccgatagataaactatagttaattaaatacattaaaaaatacttggatctttctcttaccctgtttatattgagacctgaaacttgagagagatacactaatcttgccttgttgtttcattccctaacttacaggactcagcgcatgtcatgtggtctcgttccccatttaagtcccacaccgtctaaacttattaaattattaatgtttataactagatgcacaacaacaaagcttgcaaagccaccattcactgtgttttagagctagaaatagcaagttaaaataaggctagtccgttatcaacttgaaaaagtggcaccgagtcggtgcttttttttgcggccgcaattggatcgggtttacttattttgtgggtatctatacttttattagatttttaatcaggctcctgatttctttttatttcgattgaattcctgaacttgtattattcagtagatcgaataaattataaaaagataaaatcataaaataatattttatcctatcaatcatattaaagcaatgaatatgtaaaattaatcttatctttattttaaaaaatcatataggtttagtatttttttaaaaataaagataggattagttttactattcactgcttattacttttaaaaaaatcataaaggtttagtatttttttaaaataaatataggaatagttttactattcactgctttaatagaaaaatagtttaaaatttaagatagttttaatcccagcatttgccacgtttgaacgtgagccgaaacgatgtcgttacattatcttaacctagctgaaacgatgtcgtcataatatcgccaaatgccaactggactacgtcgaacccacaaatcccacaaagcgcgtgaaatcaaatcgctcaaaccacaaaaaagaacaacgcgtttgttacacgctcaatcccacgcgagtagagcacagtaaccttcaaataagcgaatggggcataatcagaaatccgaaataaacctaggggcattatcggaaatgaaaagtagctcactcaatataaaaatctaggaaccctagttttcgttatcactctgtgctccctcgctctatttctcagtctctgtgtttgcggctgaggattccgaacgagtgaccttcttcgtttctcgcaaaggtaacagcctctgctcttgtctcttcgattcgatctatgcctgtctcttatttacgatgatgtttcttcggttatgtttttttatttatgctttatgctgttgatgttcggttgtttgtttcgctttgtttttgtggttcagttttttaggattcttttggtttttgaatcgattaatcggaagagattttcgagttatttggtgtgttggaggtgaatcttttttttgaggtcatagatctgttgtatttgtgttataaacatgcgactttgtatgattttttacgaggttatgatgttctggttgttttattatgaatctgttgagacagaaccatgatttttgttgatgttcgtttacactattaaaggtttgttttaacaggattaaaagttttttaagcatgttgaaggagtcttgtagatatgtaaccgtcgatagtttttttgtgggtttgttcacatgttatcaagcttaatcttttactatgtatgcgaccatatctggatccagcaaaggcgattttttaattccttgtgaaacttttgtaatatgaagttgaaattttgttattggtaaactataaatgtgtgaagttggagtatacctttaccttcttatttggctttgtgatagtttaatttatatgtattttgagttctgacttgtatttctttgaattgattctagtttaagtaatccatggcaccgaagaagaagcgcaaggtgatggacaaaaagtactcaatagggctcgacatagggactaactccgttggatgggccgtcatcaccgacgagtacaaggtgccctccaagaagttcaaggtgttgggaaacaccgacaggcacagcataaagaagaatttgatcggtgccctcctcttcgactccggagagaccgctgaggctaccaggctcaagaggaccgctagaaggcgctacaccagaaggaagaacagaatctgctacctgcaggagatcttctccaacgagatggccaaggtggacgactccttcttccaccgccttgaggaatcattcctggtggaggaggataaaaagcacgagagacacccaatcttcgggaacatcgtcgacgaggtggcctaccatgaaaagtaccctaccatctaccacctgaggaagaagctggtcgactctaccgacaaggctgacttgcgcttgatttacctggctctcgctcacatgataaagttccgcggacacttcctcattgagggagacctgaacccagacaactccgacgtggacaagctcttcatccagctcgttcagacctacaaccagcttttcgaggagaacccaatcaacgccagtggagttgacgccaaggctatcctctctgctcgtctgtcaaagtccaggaggcttgagaacttgattgcccagctgcctggcgaaaagaagaacggactgttcggaaacttgatcgctctctccctgggattgactcccaacttcaagtccaacttcgacctcgccgaggacgctaagttgcagttgtctaaagacacctacgacgatgacctcgacaacttgctggcccagataggcgaccaatacgccgatctcttcctcgccgctaagaacttgtccgacgcaatcctgctgtccgacatcctgagagtcaacactgagattaccaaagctcctctgtctgcttccatgattaagcgctacgacgagcaccaccaagatctgaccctgctcaaggccctggtgagacagcagctgcccgagaagtacaaggagatctttttcgaccagtccaagaacggctacgccggatacattgacggaggcgcctcccaggaagagttctacaagttcatcaagcccatccttgagaagatggacggtaccgaggagctgttggtgaagttgaacagagaggacctgttgaggaagcagagaaccttcgacaacggaagcatccctcaccaaatccacctgggagagctccacgccatcttgaggaggcaggaggatttctatcccttcctgaaggacaaccgcgagaagattgagaagatcttgaccttcagaattccttactacgtcgggccactcgccagaggaaactctaggttcgcctggatgacccgcaaatctgaagagaccattactccctggaacttcgaggaagtcgtggacaagggcgcttccgctcagtctttcatcgagaggatgaccaacttcgataaaaatctgcccaacgagaaggtgctgcccaagcactccctgttgtacgagtatttcacagtgtacaacgagctcaccaaggtgaagtacgtcacagagggaatgaggaagcctgccttcttgtccggagagcagaagaaggccatcgtcgacctgctcttcaagaccaacaggaaggtgactgtcaagcagctgaaggaggactacttcaagaagatcgagtgcttcgactccgtcgagatctctggtgtcgaggacaggttcaacgcctcccttgggacttaccacgatctgctcaagattattaaagacaaggacttcctggacaacgaggagaacgaggacatccttgaggacatcgtgctcaccctgaccttgttcgaagacagggaaatgatcgaagagaggctcaagacctacgcccacctcttcgacgacaaggtgatgaaacagctgaagagacgcagatataccggctggggaaggctctcccgcaaattgatcaacgggatcagggacaagcagtcagggaagactatactcgacttcctgaagtccgacggattcgccaacaggaacttcatgcagctcattcacgacgactccttgaccttcaaggaggacatccagaaggctcaggtgtctggacagggtgactccttgcatgagcacattgctaacttggccggctctcccgctattaagaagggcattttgcagaccgtgaaggtcgttgacgagctcgtgaaggtgatgggacgccacaagccagagaacatcgttattgagatggctcgcgagaaccaaactacccagaaagggcagaagaattcccgcgagaggatgaagcgcattgaggagggcataaaagagcttggctctcagatcctcaaggagcaccccgtcgagaacactcagctgcagaacgagaagctgtacctgtactacctccaaaacggaagggacatgtacgtggaccaggagctggacatcaacaggttgtccgactacgacgtcgaccacatcgtgcctcagtccttcctgaaggatgactccatcgacaataaagtgctgacacgctccgataaaaatagaggcaagtccgacaacgtcccctccgaggaggtcgtgaagaagatgaaaaactactggagacagctcttgaacgccaagctcatcacccagcgtaagttcgacaacctgactaaggctgagagaggaggattgtccgagctcgataaggccggattcatcaagagacagctcgtcgaaacccgccaaattaccaagcacgtggcccaaattctggattcccgcatgaacaccaagtacgatgaaaatgacaagctgatccgcgaggtcaaggtgatcaccttgaagtccaagctggtctccgacttccgcaaggacttccagttctacaaggtgagggagatcaacaactaccaccacgcacacgacgcctacctcaacgctgtcgttggaaccgccctcatcaaaaaatatcctaagctggagtctgagttcgtctacggcgactacaaggtgtacgacgtgaggaagatgatcgctaagtctgagcaggagatcggcaaggccaccgccaagtacttcttctactccaacatcatgaacttcttcaagaccgagatcactctcgccaacggtgagatcaggaagcgcccactgatcgagaccaacggtgagactggagagatcgtgtgggacaaagggagggatttcgctactgtgaggaaggtgctctccatgcctcaggtgaacatcgtcaagaagaccgaagttcagaccggaggattctccaaggagtccatcctccccaagagaaactccgacaagctgatcgctagaaagaaagactgggaccctaagaagtacggaggcttcgattctcctaccgtggcctactctgtgctggtcgtggccaaggtggagaagggcaagtccaagaagctgaaatccgtcaaggagctcctcgggattaccatcatggagaggagttccttcgagaagaaccctatcgacttcctggaggccaagggatataaagaggtgaagaaggacctcatcatcaagctgcccaagtactccctcttcgagttggagaacggaaggaagaggatgctggcttctgccggagagttgcagaagggaaatgagctcgcccttccctccaagtacgtgaacttcctgtacctcgcctctcactatgaaaagttgaagggctctcctgaggacaacgagcagaagcagctcttcgtggagcagcacaagcactacctggacgaaattatcgagcagatctctgagttctccaagcgcgtgatattggccgacgccaacctcgacaaggtgctgtccgcctacaacaagcacagggataagcccattcgcgagcaggctgaaaacattatccacctgtttaccctcacaaacttgggagcccctgctgccttcaagtacttcgacaccaccattgacaggaagagatacacctccaccaaggaggtgctcgacgcaacactcatccaccaatccatcaccggcctctatgaaacaaggattgacttgtcccagctgggaggcgactctagagccgatcccaagaagaagagaaaggtgaagagaccacgggaccgccacgatggcgagctgggaggccgcaagcgggcaaggtaggttaacctagacttgtccatcttctggattggccaacttaattaatgtatgaaataaaaggatgcacacatagtgacatgctaatcactataatgtgggcatcaaagttgtgtgttatgtgtaattactagttatctgaataaaagagaaagagatcatccatatttcttatcctaaatgaatgtcacgtgtctttataattctttgatgaaccagatgcatttcattaaccaaatccatatacatataaatattaatcatatataattaatatcaattgggttagcaaaacaaatctagtctaggtgtgttttgcgaattcgatatcaagcttatcgataccgtcgagggggggcccggtaccggcgcgccgttctatagtgtcacctaaatcgtatgtgtatgatacataaggttatgtattaattgtagccgcgttctaacgacaatatgtccatatggtgcactctcagtacaatctgctctgatgccgcatagttaagccagccccgacacccgccaacacccgctgacgcgccctgacgggcttgtctgctcccggcatccgcttacagacaagctgtgaccgtctccgggagctgcatgtgtcagaggttttcaccgtcatcaccgaaacgcgcgagacgaaagggcctcgtgatacgcctatttttataggttaatgtcatgaccaaaatcccttaacgtgagttttcgttccactgagcgtcagaccccgtagaaaagatcaaaggatcttcttgagatcctttttttctgcgcgtaatctgctgcttgcaaacaaaaaaaccaccgctaccagcggtggtttgtttgccggatcaagagctaccaactctttttccgaaggtaactggcttcagcagagcgcagataccaaatactgttcttctagtgtagccgtagttaggccaccacttcaagaactctgtagcaccgcctacatacctcgctctgctaatcctgttaccagtggctgctgccagtggcgataagtcgtgtcttaccgggttggactcaagacgatagttaccggataaggcgcagcggtcgggctgaacggggggttcg

That which is claimed:

1-38. (canceled)

39. A method for producing a genetic modification into a second gene of a plant genome without introducing an exogenous selectable marker into said plant genome, the method comprising providing a first guide polynucleotide, a polynucleotide modification template, a second guide polynucleotide, and a Cas endonuclease to a plant cell comprising a first endogenous gene that can be modified to confer herbicide resistance, wherein said first guide polynucleotide and Cas endonuclease are capable of forming a first complex that enables the Cas endonuclease to introduce a double strand break at a first target site, located in or near said first endogenous gene in the genome of said plant cell, wherein said second guide polynucleotide and Cas endonuclease are capable of forming a second complex that enables the Cas endonuclease to introduce a double strand break at a second target site in the genome of said plant cell, wherein said polynucleotide modification template comprises at least one nucleotide alteration when compared to the first endogenous gene, wherein said at least one nucleotide alteration encodes for an amino acid change in first endogenous gene.

40. The method of claim 39, wherein said first endogenous gene is an acetolactate synthase (ALS) gene.

41. The method of claim 39, wherein the first target site and the second target site are located at two different genomic loci.

42. The method of claim 39, wherein the Cas endonuclease is a Cas9 endonuclease

43. The method of claim 40, further comprising selecting at least one plant cell that has resistance to a sulphonylurea herbicide and comprises a modification into said second gene, wherein said modification includes at least one deletion, insertion or substitution of one or more nucleotides in said second gene of the plant genome.

44. The method of claim 43, wherein said modification into said second gene includes at least one deletion, insertion, or substitution of one or more nucleotides in a Fatty Acid Desaturase2-1 (FAD2-1) gene.

45. The method of claim 43, further comprising producing a plant form said plant cell, wherein said plant has resistance to said sulphonylurea herbicide and has a high oleic phenotype due to the at least one deletion, insertion, or substitution of one or more nucleotides in said Fatty Acid Desaturase2-1 (FAD2-1) gene.

46. A method for introducing a polynucleotide of interest into a plant genome without introducing an exogenous selectable marker into said plant genome, the method comprising providing a first guide RNA, a first polynucleotide modification template, a second guide RNA, a second polynucleotide modification template, and a Cas endonuclease to a plant cell comprising a first endogenous gene that can be modified to confer herbicide resistance, wherein said first guide RNA and Cas endonuclease are capable of forming a first complex that enables the Cas endonuclease to introduce a double strand break at a first target site located in or near said first endogenous gene in the genome of said plant cell, wherein said first polynucleotide modification template comprises at least one nucleotide modification of said first endogenous gene to render said endogenous gene capable of conferring herbicide resistance to a plant cell, wherein said second guide RNA and Cas endonuclease are capable of forming a second complex that enables the Cas endonuclease to introduce a double strand break at a second target site in the genome of said plant cell, wherein said second polynucleotide modification template comprises at least one polynucleotide of interest to be introduced into said plant genome.

49. The method of claim 46, wherein said first endogenous gene is an acetolactate synthase (ALS) gene.

50. The method of claim 46, wherein the Cas endonuclease is a Cas9 endonuclease

51. The method of claim 49, further comprising selecting at least one plant cell that has resistance to a sulphonylurea herbicide and comprises said at least one polynucleotide of interest in said plant genome.

52. The method of claim 51, wherein the at least one polynucleotide of interest is selected from the group consisting of herbicide-tolerance coding sequences, insecticidal coding sequences, nematicidal coding sequences, antimicrobial coding sequences, antifungal coding sequences, antiviral coding sequences, abiotic and biotic stress tolerance coding sequences, or sequences modifying plant traits such as yield, grain quality, nutrient content, starch quality and quantity, nitrogen fixation and/or utilization, and oil content and/or composition.

53. The method of claim 51, further comprising producing a plant form said plant cell, wherein said plant has resistance to a sulphonylurea herbicide and comprises said polynucleotide of interest.

54. A method for editing a second gene of a plant genome without introducing an exogenous selectable marker into said plant genome, the method comprising providing a first guide RNA, a first polynucleotide modification template, a second guide RNA, a second polynucleotide modification template, and a Cas endonuclease to a plant cell comprising a first endogenous gene that can be modified to confer herbicide resistance, wherein said first guide RNA and Cas endonuclease are capable of forming a complex that enables the Cas endonuclease to introduce a double strand break at a first target site (located in or near said first endogenous gene) in the genome of said plant cell, wherein said first polynucleotide modification template comprises at least one nucleotide modification of said first endogenous gene to render said endogenous gene capable of conferring herbicide resistance to a plant cell, wherein said second guide RNA and Cas endonuclease are capable of forming a complex that enables the Cas endonuclease to introduce a double strand break at a second target site (located at a different locus than said first endogenous gene) in the genome of said plant cell, wherein said second polynucleotide modification template comprises at least one nucleotide alteration when compared to the second gene to be edited.

56. The method of claim 54, wherein said first endogenous gene is an acetolactate synthase (ALS) gene.

57. The method of claim 54, wherein the second gene is an EPSPS gene modified to confer glyphosate resistance.

58. The method of claim 57, further comprising selecting at least one plant cell that has resistance to a sulphonylurea herbicide and comprises a modified EPSPS gene that confers glyphosate resistance.

59. The method of claim 54, wherein the Cas endonuclease is a Cas9 endonuclease

60. A method of generating a glyphosate resistant soybean plant without introducing an exogenous selectable marker into said plant genome the method comprising providing a maize plant cell wherein its endogenous chromosomal ALS gene and endogenous chromosomal EPSPS gene have been modified through a guide RNA/Cas endonuclease system to produce a glyphosate resistant EPSPS protein and growing a maize plant from said maize plant cell, wherein said plant is resistant to glyphosate.
